(19) United States
(12) Patent Application Publication
(10) Pub. No.: US 2024/0150787 A1
(43) Pub. Date: May 9, 2024

(54) ONCOLYTIC VIROTHERAPY WITH INDUCED ANTI-TUMOR IMMUNITY

(71) Applicant: University of Houston System, Houston, TX (US)

(72) Inventors: Shaun Xiaoliu ZHANG, Houston, TX (US); Xinping FU, Houston, TX (US)

(21) Appl. No.: 17/773,277

(22) PCT Filed: Oct. 29, 2020
(86) PCT No.: PCT/US20/57820

§ 371 Date: Apr. 29, 2022

Related U.S. Application Data
(60) Provisional application No. 62/929,425, filed on Nov. 1, 2019.

(51) Int. Cl. C12N 15/86; A61K 35/763; A61P 35/00; C07K 14/195; C07K 14/485; C07K 16/32

(52) U.S. Cl. CPC C12N 15/86; A61K 35/763; A61P 35/00; C07K 14/195; C07K 14/485; C07K 16/32; C07K 2318/20; C07K 2319/02; C12N 2710/16622; C12N 2710/16632; C12N 2710/16643; C12N 2710/16662; C12N 2710/16671; C12N 2830/50

(57) ABSTRACT

Provided are improved oncolytic viruses with increased bystander cell killing and induced anti-tumor immunity. The oncolytic viruses include an oncolytic herpes virus backbone genetically modified to encode a tumor cell binding component and an immunoglobulin (Ig) binding component.

### FIELD OF THE INVENTION

[0001] This invention relates generally to methods and constructs for viral oncotherapy.

### BACKGROUND OF THE INVENTION

[0002] Without limiting the scope of the invention, its background is described in connection with existing oncolytic virotherapeutics. Oncolytic viral therapy for cancer relies on use of oncolytic viruses, which are defined by their ability to selectively replicate in and destroy tumor cells without harming normal cells.

[0003] Oncolytic viruses can kill cancer cells in many different ways, ranging from direct virus-mediated cytolysis to a variety of cytotoxic immune effector mechanisms. However, current oncolytic virotherapy is limited by sub-optimal oncolytic activities, susceptibility to suppression by innate or adaptive immune effectors, and a limited ability to induce tumor specific immune responses, particularly to neoantigens.

[0004] Thus, genetic engineering has been employed throughout the past decade to circumvent these issues and generate oncolytic viral strains with superior clinical activity. See e.g. Russell S J, et al. Oncolytic virotherapy. Nat Biotechnol 30 (2012) 658-70. In 2015, Amgen gained FDA approval for the first genetically engineered virus to treat melanoma. Pol, J. et al. Oncoimmunology 5(1) (2016) e1115641. The injectable oncolytic virus, termed talimogene laherparepvec or “T-Vec,” originated with a primary isolate of human herpes simplex virus 1 (HSV-1) known as JS1 (ECACC Accession Number 01010209) that natively demonstrated enhanced oncolytic activity. JS1 was attenuated by functionally deleting both copies of RL1 (encoding the neurovirulence factor ICP34.5), as well as US12 (encoding ICP47), and a cassette encoding human granulocyte macrophage colony-stimulating factor (GM-CSF) under the control of the cytomegalovirus immediate-early promoter was inserted into the non-functional RL1 loci. The addition of GM-CSF favors the recruitment and activation of antigen-presenting cells thus promoting the initiation of a tumor-targeting immune response.

[0005] T-Vec has shown measurable and in some cases durable therapeutic efficacy in a relatively small percentage of melanoma patients. There is no doubt that the therapeutic efficacy of this and other oncolytic viruses should and can be further improved. One improvement strategy is to potentiate the ability of virotherapy in inducing antitumor immunity. Several approaches have been reported in this attempt, mostly by incorporating immune stimulatory genes into the viral genome to enhance tumor antigen presentation for induction of T cell immunity. Provided herein is an alternative strategy.

### SUMMARY OF THE INVENTION

[0006] Improved oncolytic viruses with increased bystander cell killing and induced anti-tumor immunity are provided herein, including methods of making and using such viral constructs in the treatment of cancer.

[0007] According to one aspect of the disclosure there is provided an improved oncolytic virus comprising an oncolytic virus backbone genetically modified to encode and direct secretion from infected cells of a chimeric molecule comprising a tumor cell binding component and an immunoglobulin (Ig) binding component, wherein the secreted two chimeric molecule increases bystander cell killing and anti-tumor immunity in the presence of anti-tumor antibodies. In certain aspects the immunoglobulin binding component includes at least one Ig-binding “B” domain derived from a Peptostreptococcal Protein L. In other embodiments the immunoglobulin binding component includes at least four or five Ig-binding “B” domains derived from a Peptostreptococcal Protein L.

[0008] In certain embodiments the improved oncolytic virus is constructed on Herpes Simplex Virus Type 1 (HSV1) backbone while in other embodiments the oncolytic virus backbone is based on Herpes Simplex Virus Type 2 (HSV2). In particular embodiments, the HSV1 backbone comprises at least one deletion of ICP34.5. In other embodiments, the HSV2 backbone comprises an N-domain deletion of an ICP10 enabling selective replication in tumor cells

[0009] In certain embodiments the tumor cell binding component of the improved oncolytic virus is an affibody that binds to a tumor antigen. In other embodiments, the tumor cell binding component is ligand that binds to a tumor antigen in the form of a cell surface receptor expressed or over expressed on tumor cells. In still other embodiments, the tumor cell binding components are single chain antibodies (scFvs) or single domain antibodies (nanobodies). In certain embodiments the tumor antigen is selected from human epidermal growth factor receptor 2 (HER2), epidermal growth factor receptor (EGFR), Erb-B2 Receptor Tyrosine Kinase 3 (ErbB3), epithelial cell adhesion molecule (EpCAM), mesothelin (MSLN), MET protooncogene, insulin-like growth factor 1 receptor (IGF1R), ephrin receptor A3 (EphA3), TNF receptor apoptosis-inducing ligand receptor 1 (TRAIL-R1), TNF receptor apoptosis-inducing ligand receptor 2 (TRAIL-R2), vascular endothelial growth factor receptor (VEGFR), receptor activator of nuclear factor κβ ligand (RANKL), programmed death-ligand 1 (PD-L1), phosphatase of regenerating liver 3 (PRL-3), human melanoma antigens recognized by T cells, and Carcinoembryonic Antigen (CEA) gene family products. In certain embodiments the human melanoma antigens recognized by T cells are selected from: Melanoma-associated Antigen 1 (MAGE-A1); Melanoma-associated Antigen A3 (MAGE-A3); B Melanoma Antigen (BAGE); G Antigen 2C (GAGE), Melanoma Antigen Recognized by T Cells 1 (MLANA), and premelanosome Protein (PMEL).

[0010] In a particular embodiment, the tumor cell binding component is a ligand that binds to a tumor antigen, for example, an extracellular domain of epidermal growth factor (EGF) that binds to an EGF receptor (EGFR) on tumor cells.

[0011] According to a further aspect, there is provided an improved oncolytic virus with increased bystander cell killing and induced anti-tumor immunity, the virus comprising an oncolytic herpes virus backbone genetically modified to encode an Affibody-Protein L (PL) cassette comprising an Anti-HER2 Affibody and a plurality of Protein L immunoglobulin binding domains fused together in frame to form an Affibody-PL that is engineered for extracellular secretion by cells infected with the oncolytic virus. In certain embodiments the Affibody-PL cassette comprises a synthetic signal peptide (Sp), the anti-HER2 Affibody (Affibody), a linker (such as (GGGS)3, (Gly)8, (Gly)6, (EAAAK)3), the plurality of Protein L immunoglobulin binding domain (1-5, with 5 being optimal), and a growth hormone polyadenylation signal (polyA).

[0012] According to another aspect, there is provided an improved oncolytic virus with increased bystander cell killing and induced anti-tumor immunity, the virus comprising an oncolytic herpes virus backbone genetically modified to encode an extracellular domain of epidermal growth factor (EGF) that binds to an EGF receptor (EGFR) on tumor cells and a plurality of Protein L domains fused together in frame to form an EGF-PL that is engineered for extracellular secretion by cells infected with the oncolytic virus.

[0013] An improved oncolytic virus with increased bystander cell killing and induced anti-tumor immunity, the virus comprising an oncolytic herpes virus backbone genetically modified to encode an extracellular domain of epidermal growth factor (EGF) that binds to an EGF receptor (EGFR) on tumor cells and a plurality of Protein L domains fused together in frame to form an EGF-PL that is engineered for extracellular secretion by cells infected with the oncolytic virus.

[0014] Also provided is a method of treating cancer comprising administering a therapeutically effective amount of the improved oncolytic viruses disclosed herein and a diluent or carrier.

### BRIEF DESCRIPTION OF THE DRAWINGS

[0015] For a more complete understanding of the present invention, including features and advantages, reference is now made to the detailed description of the invention along with the accompanying figures:

[0016] FIG. 1A and FIG. 1B depict the design of an Affibody-PL and its in vivo action mechanism in tumor microenvironment. FIG. 1A depicts the gene cassette of the chimeric molecule Affibody-PL. FIG. 1B depicts a predicted action mechanism of Affibody-PL after delivered to HER2-expressing or EGFR-expressing tumors by an oncolytic virus.

[0017] FIG. 2A provides a cartoon of the step-wise construction of FusOn-H2. FIG. 2B provides a cartoon of the step-wise construction of FusOn-PL. FIG. 2C shows an alignment of the 5 domains of Finegoldia magna Protein L as shown by Kastern. (Kastern W et al. “Structure of Peptostreptococcal Protein L and Identification of a Repeated Immunoglobulin Light Chain-binding Domain” JBC 267 (18) (1992) 12820-12825).

[0018] FIG. 3 shows the results of Affibody-PL efficiently binding to HER2 expressed on tumor cell surface. Tumor cells expressing different levels of HER2 (high on Skov3 cells, medium on MCF7 cells and completely negative on MDA-MB-231 cells) were sequentially incubated with 1) Affibody-PL supernatant, 2) anti-HA antibody of mouse origin and 3) FITC-conjugated goat anti-mouse IgG. The cells were then subject to flow cytometry analysis.

[0019] FIG. 4A and FIG. 4B show the capability of Affibody-PL in guiding PBMCs to kill HER2-expressing tumor cells. PBMCs were prepared from normal human blood and were mixed with SKOV3 tumor cells at the ratio of either 10 (R10) or 20 (R20) in the presence of 5 μg/ml of IgG and either of: medium, supernatant harvested from HEK293 cells transfected with a control vector (Ctl-Vec), or supernatant harvested from HEK293 cells transfected with Affibody-PL (Affibody-PL). Twenty-four hours later, PBMCs and the dead cells floating in the medium were removed and the remaining living cells were stained with 0.1% crystal violet-ethanol solution. FIG. 4A shows representative micrographs from each well of the three different preparations. FIG. 4B shows quantification of tumor cell killing. The stained tumor cells were lysed with 2% SDS and the released dye was measured at 595 nM wavelength using Spectramax 5 plate reader. The percentage of tumor cell killing was calculated by dividing the reading of cells in the well without adding PBMCs (and others) with the readings from each of the three wells. ★p<0.05 as compared with medium and Ctl-Vec.

[0020] FIG. 5A shows Western blot detection of Affibody-PL expressed from FusOn-Affibody-PL. Supernatants were collected from Vero cells infected with either FusOn-H2 or FusOn-Affibody-PL. After filtration through 0.1 μM filter, the supernatants were loaded for gel electrophoresis and western blotting with rabbit anti-HA tag IgG as the first antibody. FIG. 5B shows flow cytometry analysis on the binding of Affibody-PL produced from FusOn-Affibody-PL to murine tumor cells expressing HER2. The experiment was similarly conducted as in FIG. 3, with the exception that a murine colon cancer cell line that was stably transduced with HER2 (CT26-HER2) was used. FIG. 5C shows measurement on the capability of Affibody-PL in guiding PBMCs to kill HER2-expressing tumor cells. The experiment was similarly conducted as in FIG. 4B, with the exception that: 1) the cells are of murine origin (CT26-HER2 and splenocytes harvested from Balb/c mice), 2) mouse Igs were used, and 3) the supernatants were obtained from FusOn-H2 or FusOn-Affibody-PL infected cells. ★p<0.05 as compared with medium and FusOn-H2 supernatant.

[0021] FIG. 6A shows NK cell infiltration during virotherapy of FusOn-H2 and FusOn-Affibody-PL. Tumor tissues were collected 3 days after mice were treated with 1×10⁷ pfu of either PBS, FusOn-H2 or FusOn-Affibody-PL. The collected tumor tissues were divided into halves. One half was paraffin-embedded and the tissue sections were used for immunohistochemical staining for NK cells. The positively stained NK cells were indicated with black arrows. The other half was used to prepare cryosections, which were then immunohistochemically stained for both NK marker (NCR1) and ki67 (FIG. 6B). The positively stained NK cells were indicated with white arrowheads and cells positively stained for ki67 were indicated with white arrows.

[0022] FIG. 7A and FIG. 7B show the results of a therapeutic evaluation and comparison of virotherapy between FusOn-H2 and FusOn-PL. CT26-HER2 tumor cells were implanted subcutaneously. When tumors reached the approximate size of 5 mm in diameter, mice were treated intratumorally with 1×10⁷ pfu of either FusOn-PL or 1×10⁷ FusOn-H2, or PBS as a negative control. FIG. 7A shows the change of tumor size following treatment. FIG. 7B shows the results of an IFN-γ ELISPO assay on Class I neoantigen-specific antitumor immunity during virotherapy. The photos show a typical area of the wells from ELISPOT assay with the indicated neoantigen peptide or the no peptide control. ★p<0.05 as compared with either FusOn-H2 or PBS.

[0023] FIG. 8A shows the results of a therapeutic evaluation of a short term virotherapy with FusOn-H2 and FusOn-PL. The experimental procedure was identical to those described in FIG. 7A. FIG. 8A show the results of tumor size measured consecutively for three weeks before all mice were euthanized. Tumor growth ratio was calculated by dividing the tumor volume measured at the indicated time with the tumor volume immediately before the start of treatment. FIG. 8B shows the enumeration data of ELISPOT assay on the neoantigen peptides shown in Table 2 and the mixture of them. The controls include no peptide or an unrelated peptide (the ovalbumin Class II peptide (OVA 323-339). ★p<0.05 as compared with FusOn-H2. +p<0.05 as compared with PBS.

[0024] FIG. 9A shows a schematic of Synco-4 construction beginning with Synco-2D. FIG. 9B shows identification Synco-47G transformants by green fluorescence.

[0025] FIG. 10 shows expression and secretion of EGF-PL by Synco-4 in 293 cells that were either transfected with a plasmid (pCR-ul47-EGFPL) that contains the EGF-PL gene cassette or infected with Synco-4.

[0026] FIG. 11A and FIG. 11B show that EGF-PL produced by Synco-4 binds to EGFR expressed on tumor cells with high efficiency and specificity. FIG. 11A shows flow cytometry of the staining for EGFR expression on CT-26-EGFR cells but not on other tumor cells. FIG. 11B shows flow cytometry evidencing that EGF-PL in the supernatant of Synco-4 infection can strongly bind to CD26-EGFR cells.

[0027] FIGS. 12A-12G show cytotoxicity effect of Synco-4 on various tumor cell lines. Tumor cells are treated with Synco-4 at 0.003-3 MOI (Multiply of infection) and detected viability using MTT assay kit after 48 hr incubation. The data shows that Synco-4 induces dose-dependent inhibition of tumor cell proliferation on Syrian Hamster adenocarcinoma cells (HaP-T1) (FIG. 12A), Murine breast cancer cells (4T-1) (FIG. 12B), Murine colon cancer cells (CT-26) (FIG. 12C), Human glioblastoma cells (U87) (FIG. 12D), Human pharynx squamous carcinoma cells (FaDu) (FIG. 12E), Human hepatocellular carcinoma cell (HEPG2) (FIG. 12F), and Human osteosarcoma cells (MNNG-HOS1) (FIG. 12G).

[0028] FIG. 13 depicts results showing that Synco-4 has an enhanced antitumor activity over the parental synco-2D against CD26-EGFR tumor.

SUMMARY OF THE SEQUENCE LISTING

| SEQ ID NO: | Description |
|---|---|
| SEQ ID NO: 1 | Codon optimized sequence encoding Finegoldia magna |
| | Protein L 1^{st} kappa light chain binding domain |
| SEQ ID NO: 2 | Codon optimized sequence encoding Finegoldia magna |
| | Protein L 5 kappa light chain binding domains |
| SEQ ID NO: 3 | Anti-HER2 Affibody |
| SEQ ID NO: 4 | Rous sarcoma virus (RSV) long terminal repeat |
| | (LTR) of Affibody-PL (FIG. 1A) |
| SEQ ID NO: 5 | signal peptide (Sp) (synthetic) of FIG. 1A |
| SEQ ID NO: 6 | Linker-HA tag (HA) of FIG. 1A |
| SEQ ID NO: 7 | polyadenylation signal (polyA) (bovine growth |
| | hormone) of FIG. 1A |
| SEQ ID NO: 8 | Modified ICP10 domain (mICP10) of FIG. 2A |
| | including CMV promoter and EGFP |
| SEQ ID NO: 9 | Affibody-PL gene cassette |
| SEQ ID NO: 10 | EGF ligand |
| SEQ ID NO: 11 | HSV-2 ICP10 left flanking region |
| | amplification primer |
| SEQ ID NO: 12 | HSV-2 ICP10 left flanking region |
| | amplification primer |
| SEQ ID NO: 13 | RR domain and the right-flank region |
| | amplification primer |
| SEQ ID NO: 14 | RR domain and the right-flank region |
| | amplification primer |
| SEQ ID NO: 15 | CMV promoter-EGFP PCR amplification primer |
| SEQ ID NO: 16 | CMV promoter-EGFP PCR amplification primer |
| SEQ ID NO: 17 | entire sequence of FusOn-Affibody-PL |
| SEQ ID NO: 18 | CT26-M19 MHC class I neoantigen peptide |
| SEQ ID NO: 19 | CT26-M39 MHC class I neoantigen peptide |
| SEQ ID NO: 20 | CT26-M26 MHC class I neoantigen peptide |
| SEQ ID NO: 21 | CT26-ME1 MHC class II neoantigen peptide |
| SEQ ID NO: 22 | CT26-ME2 MHC class II neoantigen peptide |
| SEQ ID NO: 23 | CT26-ME20 MHC class II neoantigen peptide |
| SEQ ID NO: 24 | CT26-ME37 MHC class II neoantigen peptide |
| SEQ ID NO: 25 | entire sequence of Synco-4 |
| SEQ ID NO: 26 | Lox P1 |
| SEQ ID NO: 27 | LoxP2 |
| SEQ ID NO: 28 | SV40 Poly A |
| SEQ ID NO: 29 | Amino acid sequence of Finegoldia magna |
| | Protein L 1^{st} kappa binding domain |
| SEQ ID NO: 30 | Amino acid sequence of Finegoldia magna |
| | Protein L 2^{nd} kappa binding domain |
| SEQ ID NO: 31 | Amino acid sequence of Finegoldia magna |
| | Protein L 3^{rd} kappa binding domain |
| SEQ ID NO: 32 | Amino acid sequence of Finegoldia magna |
| | Protein L 4^{th} kappa binding domain |
| SEQ ID NO: 33 | Amino acid sequence of Finegoldia magna |
| | Protein L 5^{th} kappa binding domain |
| SEQ ID NO: 34 | Amino acid sequence of 5 kappa binding |
| | domain Protein L of Finegoldia magna |
| SEQ ID NO: 35 | entire sequence of Synco-2D |
| SEQ ID NO: 36 | entire sequence of FusOn-H2 |

### DETAILED DESCRIPTION OF THE INVENTION

[0030] One of the major host defense mechanisms against viral infection is via innate immune cells, which include NK cells and macrophages. They can rapidly clear the introduced oncolytic virus and thus present a major obstacle for cancer virotherapy. Provided herein are constructs and methods that redirect the infiltrating innate immune cells to attack tumor cells instead. In exemplary embodiments disclosed herein, herpes simplex virus (HSV)-based oncolytic viruses, FsOn-H2 (SEQ ID NO: 36) or Synco-2D (SEQ ID NO: 35), are armed with a secreted form of chimeric molecule that contains two separate components. In certain embodiments, component one is either an affibody (approx. 58 aa peptide) that binds with a tumor antigen such as (for example) HER2 or the extracellular domain of the epidermal growth factor (EGF) that binds to the EGF receptor (EGFR) on tumor cells. The second component is Protein L (PL) that can bind to a variety of immunoglobulins (Igs), including antibodies against HSV. In vitro experiments disclosed herein demonstrate that the secreted chimeric molecule can actively engage macrophages and NK cells with HER2 or EGFR-expressing tumor cells by simultaneously binding to the Fc receptors on the innate immune cells (through the engaged Igs) and HER2 or EGFR on tumor cells, leading to efficient killing of the latter. Subsequent evaluation in murine tumor models with limited permissiveness to FusOn-H2 or Synco-2D shows that arming the viruses with this chimeric molecule can significantly boost the therapeutic activity. Moreover, the data provided herein indicate that the combined killing effect from the engaged innate immune cells and the oncolytic virus provides an impetus to more efficiently stimulate the host's antitumor immunity than the FusOn-H2 or Synco-2D virotherapy alone. Together, the data provided herein show that arming an oncolytic virus with this strategy represents a viable way of potentiating the oncolytic and immunotherapeutic effect of a virotherapy.

[0031] While the making and using of various embodiments of the present invention are discussed in detail below, it should be appreciated that the present invention provides many applicable inventive concepts which can be employed in a wide variety of specific contexts. The specific embodiment discussed herein are merely illustrative of specific ways to make and use the invention and do not delimit the scope of the invention.

[0032] ABBREVIATIONS: The following abbreviations are used throughout this application:

| | |
|---|---|
| ADCC | antibody-dependent cell-mediated cytotoxicity |
| BAGE | B Melanoma Antigen (OMIM 605167) |
| CEA | Carcinoembryonic Antigen gene family, |
| | including OMIM 114890 |
| EGFR | Epidermal Growth Factor Receptor, aka |
| | ErbB-1, HER1 in humans (OMIM 131550) |
| ErbB3 | Erb-B2 Receptor Tyrosine Kinase 3 (OMIM190151) |
| EphA3 | ephrin receptor A3 (OMIM 179611) |
| GAGE | G Antigen 2C (OMIM entry 300595) |
| gp75 | intracellular melanosomal membrane glycoprotein |
| | (OMIM115501) |
| HER-2 | Human Epidermal Growth Factor Receptor 2 or |
| | HER2/neu, aka Receptor tyrosine-protein kinase |
| | erbB-2, also known as CD340, proto-oncogene |
| | Neu, Erbb2 (rodent), or ERBB2 (human) (OMIM164870) |
| HSV | Herpes Simplex Virus |
| IGF1R | insulin-like growth factor 1 receptor (OMIM147370) |
| MAGE-1 | Melanoma-associated Antigen 1 (aka MAGEA1, OMIM 300016) |
| MAGE-3 | Melanoma antigen, Family A3 (OMIM 300174) |
| MLANA | Melanoma Antigen Recognized by T Cells 1, aka MART-1, |
| | MelanA (OMIM 605513) |
| MSLN | Mesothelin (OMIM601051) |
| MET | MET Protooncogene (aka Hepatocyte growth factor receptor, |
| | OMIM 164860) |
| NK | Natural Killer |
| PL | Protein L - immunoglobulin (Ig) binding protein derived from a |
| | cell wall protein generated by certain strains of the gram-positive |
| | anaerobic bacteria Peptostreptococcus magnus |
| | (now known as Finegoldia magna). |
| PMEL | Premelanosome Protein (aka melanocyte protein 17, PMEL17, |
| | PMELGP100, gp100, OMIM 155550) |
| RANKL | receptor activator of nuclear factor κβ ligand (OMIM602642) |
| PD-L1 | programmed death-ligand 1 (aka CD274, OMIM605402) |
| PTP4A3 | Protein-Tyrosine Phosphatase, Type 4A, 3 (aka phosphatase of |
| | regenerating liver 3, PRL-3 OMIM 606449) |
| TRAIL-R1 | TNF receptor apoptosis-inducing ligand |
| | receptor 1 (OMIM 603611) |
| TRAIL-R2 | TNF receptor apoptosis-inducing ligand |
| | receptor 2 (OMIM 603612) |
| VEGFR | vascular endothelial growth factor |
| | receptor (OMIM191306) |

[0033] To facilitate the understanding of this invention, and for the avoidance of doubt in construing the claims herein, a number of terms are defined below. Terms defined herein have meanings as commonly understood by a person of ordinary skill in the areas relevant to the present invention. The terminology used to describe specific embodiments of the invention does not delimit the invention, except as outlined in the claims.

[0034] The terms such as “a,” “an,” and “the” are not intended to refer to a singular entity unless explicitly so defined, but include the general class of which a specific example may be used for illustration. The use of the terms “a” or “an” when used in conjunction with “comprising” in the claims and/or the specification may mean “one” but may also be consistent with “one or more,” “at least one,” and/or “one or more than one.”

[0035] The use of the term “or” in the claims is used to mean “and/or” unless explicitly indicated to refer to alternatives as mutually exclusive. Thus, unless otherwise stated, the term “or” in a group of alternatives means “any one or combination of” the members of the group. Further, unless explicitly indicated to refer to alternatives as mutually exclusive, the phrase “A, B, and/or C” means embodiments having element A alone, element B alone, element C alone, or any combination of A, B, and C taken together.

[0036] Similarly, for the avoidance of doubt and unless otherwise explicitly indicated to refer to alternatives as mutually exclusive, the phrase “at least one of” when combined with a list of items, means a single item from the list or any combination of items in the list. For example, and unless otherwise defined, the phrase “at least one of A, B and C,” means “at least one from the group A, B, C, or any combination of A, B and C.” Thus, unless otherwise defined, the phrase requires one or more, and not necessarily not all, of the listed items.

[0037] The terms “comprising” (and any form thereof such as “comprise” and “comprises”), “having” (and any form thereof such as “have” and “has”), “including” (and any form thereof such as “includes” and “include”) or “containing” (and any form thereof such as “contains” and “contain”) are inclusive or open-ended and do not exclude additional, unrecited elements or method steps.

[0038] The term “effective” as used in the specification and claims, means adequate to provide or accomplish a desired, expected, or intended result.

[0039] The terms “about” or “approximately” are defined as being close to as understood by one of ordinary skill in the art, and in one non-limiting embodiment the terms are defined to be within 10%, within 5%, within 1%, and in certain aspects within 0.5%.

[0040] In order for an oncolytic virus to efficiently infect and lyse tumor cells, it has to overcome the host's defense mechanisms that are normally initiated when infectious agents are encountered. The innate immune system is the first line of such a defense response, which can be launched almost instantly as soon as the oncolytic virus is administered. As such, the innate immune response presents as a significant barrier to cancer virotherapy. The major components of innate antiviral immunity include natural killer (NK) cells, macrophages and interferons (IFNs). Studies by Fulci and others have shown that depletion of macrophages during virotherapy can significantly improve the therapeutic activity from an oncolytic herpes simplex virus (HSV). See Fulci G, et al. Cyclophosphamide enhances glioma virotherapy by inhibiting innate immune responses. Proc Natl Acad Sci USA 103(34) (2006) 12873-8. Others have shown that NK cells are recruited by oncolytic HSV to the tumor site within hours after virus administration, leading to quick clearance of the introduced virus and hence a diminished therapeutic effect in a murine glioblastoma model. These and other similar reports have clearly underscored the importance in limiting the innate antiviral immunity during cancer virotherapy.

[0041] On the other hand, the two major cellular components of innate antiviral immunity, NK cells and macrophages, have the potential capacity to kill malignant cells if properly activated or guided. It is thus plausible that a strategy may be developed to divert the infiltrating innate immune cells away from clearing the oncolytic virus during virotherapy, and to guide them to attack tumor cells instead.

[0042] Antibodies to the oncolytic virus represent another major limiting factor to the full therapeutic effect of virotherapy, as they can neutralize the oncolytic virus during its spread within tumor tissues. Thus, one approach is to exploit the massive infiltration of these innate immune cells during virotherapy by converting them to tumor-targeted effector cells. One of the important activation mechanisms for NK and macrophage is antibody-dependent cell-mediated cytotoxicity (ADCC). ADCC is triggered by the binding of the Fc portion of IgG to Fc gamma receptors (FcγRs), which becomes exposed when multiple IgG molecules are in an aggregated multimeric form (e.g., within an immune complex).

[0043] A potentially useful immunoglobulin aggregator is Protein L (“PL”), which is an immunoglobulin (Ig) binding protein derived from a cell wall protein generated by certain strains of the gram-positive anaerobic bacteria Peptostreptococcus magnus (now known as Finegoldia magna). The PL gene product is a 76 to 106-kDa protein containing four or five highly homologous, consecutive extracellular Ig-binding domains “B” domains, each 72 to 76 amino acid residues long. See Kastern W et al. “Structure of Peptostreptococcal Protein L and Identification of a Repeated Immunoglobulin Light Chain-binding Domain” JBC 267 (18) (1992) 12820-12825. The amino acid sequence of the first kappa light chain binding domain of Finegoldia magna Protein L is set out in SEQ ID NO:29. The amino acid sequence of the second kappa light chain binding domain of Finegoldia magna Protein L is set out in SEQ ID NO:30. The amino acid sequence of the third kappa light chain binding domain of Finegoldia magna Protein L is set out in SEQ ID NO:31. The amino acid sequence of the fourth kappa light chain binding domain of Finegoldia magna Protein L is set out in SEQ ID NO:32. The amino acid sequence of the fifth kappa light chain binding domain of Finegoldia magna Protein L is set out in SEQ ID NO:33. An exemplary codon optimized sequence encoding the first kappa light chain binding domain of Finegoldia magna Protein L is set out in SEQ ID NO:1. An alignment of the 5 domains of Finegoldia magna Protein L as shown by Kastern (supra) is shown in FIG. 2C. In certain embodiments, the immunoglobulin aggregator is formed by a plurality of kappa light chain binding domains of Finegoldia magna Protein L wherein each of the individual kappa light chin binding domains has at least 80% amino acid identity with the first kappa light chain binding domain of Finegoldia magna Protein L as set out in SEQ ID NO:29. In other embodiments, the immunoglobulin aggregator can be a plurality of any combination of the kappa light chain binding domains of Finegoldia magna Protein L as set out in any of SEQ ID NO:29, SEQ ID NO:30, SEQ ID NO:31, SEQ ID NO:32, and SEQ ID NO:33.

[0044] Unlike Proteins A and G that bind to the Fc region of Ig, Protein L binds to the variable regions of kappa light chains of the entire classes of Igs, including IgG, IgM, IgA, IgE and IgD. This allows the Fc region of the bound antibodies to bind to the FcγRs on innate immune cells to initiate ADCC. Most importantly, similar to Proteins A and G, Protein L also possesses multiple copies (up to five) of Ig-binding domains. This allows a single Protein L molecule to bind multiple units of Ig simultaneously, creating an aggregated multimeric form of Ig with the potential to induce Fc receptor oligomerization and hence the consequential initiation of ADCC. The amino acid sequence of the Finegoldia magna Protein L including the five kappa light chain binding domains is set out in SEQ ID NO: 34. An exemplary codon optimized sequence encoding the Finegoldia magna Protein L including the five kappa light chain binding domains is set out in SEQ ID NO:1.

[0045] In certain embodiments the immunoglobulin aggregator includes a plurality of kappa light chain binding domains each having kappa light chin binding activity and having at least 80 percent amino acid sequence homology to the amino acid sequence of the first kappa light chain binding domain of Finegoldia magna Protein L set out in SEQ ID NO:29.

[0046] The strategy of using Protein L to engage both Igs and innate immune cells to guide them to attack tumor cells can theoretically divert these two immune components away from clearing oncolytic virus, thus allowing it to fully replicate and spread within tumor tissues. As such, this strategy not only provides additional killing effect, but also potentiates the oncolytic effect of virotherapy per se.

[0047] In one embodiment provided herein, the above-mentioned features of Protein L Ig binding domains are exploited to enhance the therapeutic effect of an oncolytic virus. In this embodiment, oncolytic viruses are designed to redirect the infiltrating innate immune cells to attack tumor cells instead of clearing the introduced oncolytic virus. Specifically, a HSV-2-based oncolytic virus termed “FusOn-H2” was constructed to express a soluble form of a chimeric molecule consisting of a HER2-specific Affibody attached to Protein L. In other embodiments the HSV-1-based oncolytic virus termed “Synco-2D” was instead utilized, and the PL is linked to EGF so that the EGF-PL can target tumor cells overexpressing EGFR. The concept is applicable to other oncolytic virus constructs.

[0048] The Anti-HER2 Affibody is a short polypeptide with a strong binding affinity to the HER2 tumor associated antigen. In one embodiment the anti-HER2 Affibody has the sequence set out in SEQ ID NO: 3. In vitro experiments described herein demonstrated that the chimeric molecule can actively engage macrophages and NK cells with HER2-expressing tumor cells in the presence of Ig, leading to efficient killing of the latter. Subsequent evaluation in a murine tumor model with limited permissiveness to FusOn-H2 showed that arming the virus with this chimeric molecule significantly boosts the therapeutic activity. Moreover, data presented herein indicate that the combined killing effect from the engaged innate immune cells and the oncolytic virus provides an impetus to more efficiently stimulate the host's antitumor immunity than the FusOn-H2 virotherapy alone. Together, the data suggest that arming an oncolytic virus with this strategy represents a viable way of potentiating the oncolytic and immunotherapeutic effect of a virotherapy.

[0049] The sole oncolytic virus that has been approved by the US Food and Drug Administration (FDA) for clinical application, Imlygic or T-VEC, has shown measurable and in some cases durable therapeutic efficacy in a relatively small percentage of melanoma patients. There is no doubt that the therapeutic efficacy of this and other oncolytic viruses should and can be further improved. One improvement strategy is to potentiate the ability of virotherapy in inducing antitumor immunity. Several approaches have been reported in this attempt, mostly by incorporating immune stimulatory genes into the viral genome to enhance tumor antigen presentation for induction of T cell immunity.

[0050] Provided herein is an alternative strategy to those previously undertaken, which is designed to arm an oncolytic virus with a chimeric molecule that can guide the infiltrating innate immune cells to destroy tumor cells. This is in contrast to other strategies that are mainly focused on the host's adaptive immune cells such as T cells. The chimeric element includes a tumor cell specific targeting moiety and Protein L as an Ig binding domain. One of the unique advantages of this strategy is that it exploits the extensive infiltration of these innate immune cells during virotherapy, as lack of sufficient T cell presence in solid tumors has been considered as a major hurdle for cancer immunotherapies such as check-point blockers and other strategies designed to potentiate T effector cells. Indeed, immunohistochemistry staining on tumor tissues treated with FusOn-Affibody-PL revealed an extensive infiltration of NK cells. The combined effect of Affibody-PL in guiding the infiltration of innate immune cells and the local release of Affibody-PL or EGF-PL, together resulting in destruction of additional tumor cells, apparently contributes to additional and hence enhanced antitumor activities seen from the in vivo studies. Indeed, half of the tumor-bearing mice treated with FusOn-Affibody-PL were completely tumor-free by the end of the experiment. Subsequent challenge of these mice with fresh tumor cells failed to initiate tumor growth in these mice, indicating the possibility that a robust T-cell mediated antitumoral immunity was subsequently generated by the applied virotherapy in these mice.

[0051] Tumor antigen present on tumor cells are targetable by viral encoded molecules that recognize and bind to the tumor antigens. Examples of tumor antigens include human epidermal growth factor receptor 2 (aka HER-2 and ErbB2, currently targeted in antibody mediated therapy with trastuzumab (aka HERCEPTIN®)), epidermal growth factor receptor (EGFR; also known as ErbB1), Erb-B2 Receptor Tyrosine Kinase 3 (ErbB3), mesothelin, MET tyrosine kinase receptor, insulin-like growth factor 1 receptor (IGF1R), ephrin receptor A3 (EphA3), TNF receptor apoptosis-inducing ligand receptor 1 (TRAIL-R1), TNF receptor apoptosis-inducing ligand receptor 2 (TRAIL-R2), vascular endothelial growth factor receptor (VEGFR), the receptor activator of nuclear factor κβ ligand (RANKL) and programmed death-ligand 1 (PD-L1). New tumor antigens include the cancer-related phosphatase PRL-3, the human melanoma antigens recognized by T cells including the MAGE-1 (Melanoma-associated Antigen 1, aka MAGEA1, OMIM entry 300016), MAGE-3 (aka Melanoma antigen, Family A3, OMIM entry 300174), BAGE (aka B Melanoma Antigen, OMIM entry 605167), and GAGE families (aka G Antigen 2C, OMIM entry 300595), as well as MelanA (Melanoma Antigen Recognized by T Cells 1, aka MLANA, MART-1, OMIM entry 605513), and Premelanosome Protein (PMEL, aka melanocyte protein 17, PMEL17, PMELGP100, gp100, OMIM entry 155550). Further targets include certain gene products of the Carcinoembryonic Antigen (CEA) gene family including OMIM entry 114890).

[0052] Thus, the targeting element of the chimeric molecule expressed by the virus specifically binds a tumor antigen such as those identified above. In certain embodiments, the targeting element expressed by the virus is an affibody, while in other embodiments the targeting element is single-chain variable fragment (scFv) or single domain antibody directed to a cell surface tumor antigen. A non-limiting working example provided herein involves the use of a HER-2 affibody that binds HER-2 on the tumor surface coupled with PL. In other embodiments the targeting element is a ligand for a cell surface receptor on a tumor cell. A non-limiting working example provided herein involves the use of EGF that binds to EGFR on the tumor surface coupled with PL.

[0053] There is an increasing attention in recent years on exploring neoantigens for cancer immunotherapy. Unlike tumor associated tumor antigens, neoantigens are derived from nonsynonymous mutations in tumor cell genome and are thus strictly tumor-specific. However, one of the challenges facing neoantigen-based immunotherapy is that the neoepitopes are usually not shared among cancer patients. The current approach of first identifying these neoantigens by exome sequencing followed by synthesizing and delivering the antigenic epitopes to each individual patient is cumbersome and can only be applied to cancer patients on a case-by-case basis. In principle, oncolytic virotherapy would offer a simple means to release these neoantigens in individual patients, ensuring their efficient and timely presentation to the host's immune system. However, such a capability has not heretofore been examined. The examination on FusOn-Affibody-PL treated CT-26 tumor cells revealed that the armed virus has the capability in inducing neoantigen-specific antitumor immunity for neoantigenic peptides for both MHC Class I and Class II. The surprising data presented herein represents the first demonstration that virotherapy can induce measurable neoantigen-specific antitumor immunity.

[0054] Although the design of Affibody-PL limits its application to tumor cells overexpressing HER2, this same strategy can be readily adapted to target other tumors by replacing Affibody with other binding moiety such as a ligand for different growth factor receptors or a single chain antibody. Indeed, as provided herein, in one embodiment the Affibody in the Affibody-PL chimeric construct was replaced with the binding domain of epidermal growth factor (EGF) to its receptor, and it was found that this construct can efficiently target tumor cells that overexpress EGFR (FIG. 11A). Additionally, it was also found that either of EGF-PL (or Affibody-PL for the same matter) can be incorporated into a HSV-1-based oncolytic virus to produce a similar potentiation effect (FIG. 12). Thus, it is anticipated that the disclosed strategy can be widely adapted, including the possibility to oncolytic viruses derived from other viruses, for treating a variety of malignant diseases.

[0055] The following examples are included for the sake of completeness of disclosure and to illustrate the methods of making the compositions and composites of the present invention as well as to present certain characteristics of the compositions. In no way are these examples intended to limit the scope or teaching of this disclosure.

### Example 1

### Constructions of the Disclosed Embodiments

[0056] FIG. 1A and FIG. 1B depict the design of an exemplary Affibody-PL and its in vivo action mechanism in tumor microenvironment. Affibody molecules are short peptides of 58 amino acid long, and are based a three-alpha-helical Z-domain scaffold that can be selected from combinatorial libraries to bind to a particular protein target with strong affinity and specificity. See Feldwisch J, et al. “Engineering of affibody molecules for therapy and diagnostics” Methods Mol Biol. 899 (2012) 103-26. Examples of suitable affibodies selected for strong binding affinity to HER2 are available. See Orlova A, et al. “Tumor imaging using a picomolar affinity HER2 binding affibody molecule” Cancer Res. 66(8) (2006) 4339-48; Steffen A C, et al. “Affibody-mediated tumour targeting of HER-2 expressing xenografts in mice” Eur J Nucl Med Mol Imaging 33(6) (2006) 631-8. The coding sequence from the five immunoglobulin-binding domains (B1-B5) was chosen from Protein L of Peptostreptococcus magnus as reported by Kastern et. al. (supra). Anti-HER2 Affibody and PL sequences were fused together in frame for the construction of Affibody-PL. A signal peptide (Sp) was added to the N-terminus to enable the chimeric molecule as a soluble form. FIG. 1A depicts the gene cassette of the chimeric molecule Affibody-PL that can guide innate immune cells to attack tumor cells through a serious of intermolecular engagements. On the sequential order from left to right: Rous sarcoma virus (RSV) long terminal repeat (LTR) (SEQ ID NO:4), a synthetic signal peptide (Sp) (SEQ ID NO:5) (as reported by Barash et al, Human secretory signal peptide description by hidden Markov model and generation of a strong artificial signal peptide for secreted protein expression. Biochemical and Biophysical Research Communications 294 (2002) 835-842), anti-HER2 Affibody (Affibody) (SEQ ID NO:3), Linker-HA tag (HA) (SEQ ID NO:6), the B1-B5 immunoglobulin binding domains of Protein L (SEQ ID NO:2), and bovine growth hormone polyadenylation signal (polyA) (SEQ ID NO:7). As one of skill in the art appreciates, other polyadenylation sites such as for example the SV40 PolyA (SEQ ID NO: 28) could be alternatively used. The actual length of the coding sequence of each component is not proportional to the size of the drawn box.

[0057] The schematic diagram in FIG. 1B illustrates an action mechanism of Affibody-PL once it is delivered to the tumor tissues by an oncolytic virus. Local administration of virotherapy will bring all the components together in the tumor microenvironment. The linchpin to trigger the illustrated chain intermolecular reaction is the soluble form of Affibody-PL, which can simultaneously bind to HER2-expressing tumor cells through Affibody and immunoglobulins (Igs) through PL. The Fc region of the Igs can subsequently bind and crosslink the Fc receptors on the surface of NK cells and macrophages, resulting in the activation of these innate immune cells and the killing of tumor cells. This strategy is envisaged to potentiate the overall antitumor effect of an oncolytic virotherapy on two fronts. First, it produces additional bystander antitumor activity by engaging innate immune cells with tumor cells. Second, it diverts two of the major components of antiviral immunity away from clearing the introduced oncolytic virus—the neutralizing antibodies and the innate immune cells including NK cells and macrophages, allowing virotherapy to exhibit maximal oncolytic effects. In the predicted action mechanism of Affibody-PL after delivered to HER2-expressing tumors by an oncolytic virus depicted in FIG. 1B, each of the key components is labeled. The administered oncolytic virus will express Affibody-PL in situ as well as attract innate immune cells such as NK cells and macrophages (Mc)) to the tumor site. The secreted Affibody-PL engages the infiltrated innate immune cells with tumor cells through a series of intermolecular binding events: Affibody to HER2, PL to Igs and Igs (via Fc region) to NK cells or macrophages (via Fc receptor).

[0058] The composition of an embodiment of a chimeric virus is depicted in FIG. 2A. FIG. 2A specifically depicts the step-wise construction of FusOn-H2. Depicted on the top is the genome of wild type HSV-2 (w.t. HSV-2, wild-type HSV-2 strain 186). The HSV genome is about 152 kb long and it contains the terminal repeats (TRs) and internal repeats (IRs), which are marked accordingly, as are the ICP10 and ICP47 genes. HSV-2 possesses several unique features that have been previously exploited by the inventors to convert it into an oncolytic agent. The HSV-2 ICP10 gene, the counterpart of ICP6 in HSV-1, contains in its N-terminus a well-defined region (N-domain) that can bind and phosphorylate the GTPase-activating protein Ras-GAP, leading to activation of the Ras/MEK/MAPK mitogenic pathway and c-Fos induction and stabilization, which are prerequisites for efficient HSV-2 replication. Deletion of this domain from the viral genome impairs virus growth in normal cells, which usually have an inactive Ras signaling pathway. As the Ras signaling pathway is a key regulator of normal cell growth, it is aberrantly activated in most human tumors due to either mutations in the Ras genes themselves or alterations in upstream or downstream signaling components. The present inventors previously established that a mutant HSV-2 deleted for the N-domain of the ICP10 gene would be able to replicate selectively in these tumor cells and that its replication would be restricted in normal cells with an inactive Ras pathway. A mutant HSV-2 (FusOn-H2) was constructed by replacing the PK domain of the ICP10 gene with the DNA sequence encoding the enhanced green fluorescent protein (EGFP).

[0059] The construction and use of FusOn-H2 is described in U.S. Pat. No. 8,986,672, which is incorporated herein by reference in its entirety. For constructing FusOn-H2, the N-domain of the ICP10 gene is deleted and replaced with the EGFP gene under expression of the CMV (cytomegalovirus) immediate early promoter, leaving the C-terminal ribonucleotide reductase (RR) domain intact and resulting in a modified ICP10 (mICP10, SEQ ID NO:8). Briefly, the HSV genome region containing the ICP10 left-flanking region (equivalent to nucleotide span 85994-86999 in the HSV-2 genome) was amplified with primer oligos 5′-TTGGTCTTCACCTACCGACA (SEQ ID NO:11), 3′-GACGCGATGAACGGAAAC (SEQ ID NO:12), while the RR domain and the right-flank region (equivalent to nucleotide span 88228-89347) were amplified with primer oligos 5′-ACACGCCCTATCATCTGAGG (SEQ ID NO:13), 3′-AACATGATGAAGGGGCTTCC (SEQ ID NO:14). In other words, this equates to a deletion of nucleotides 87000-87023, which is the ICP10 promoter region, and a deletion of nucleotides 87024-88226, which is the first 1,204 nucleotides of ICP10 domain (i.e. a deletion of amino acids 1 to 402 of the endogenous ICP10 polypeptide). The two PCR products were cloned into pNeb193 through EcoRI-NotI-XbaI ligation, generating pNeb-ICP10-deltaPK. Then the DNA sequence containing the CMV promoter-EGFP gene was PCR amplified from pSZ-EGFP with primer oligos 5′-ATGGTGAGCAAGGGCGAG (SEQ ID NO:15), 3′-CTTGTACAGCTCGTCCATGC (SEQ ID NO:16). The PCR-amplified DNA was then cloned into the deleted PK locus of pNeb-ICP10-deltaPK through BglII and NotI ligation, generating pNeb-PKF-2. During the design of PCR amplification strategies, the EGFP gene was fused in-frame with the remaining RR domain of the ICP10 gene, so that the new protein product of this gene contained the intact EGFP, which would facilitate the selection of the recombinant virus in the following experimental steps. The modified ICP10 gene was inserted into the virus by homologous recombination in which the pNeb-PKF-2 plasmid DNA was cotransfected with purified wt186 virion DNA into Vero cells by use of Lipofectamine (Invitrogen, Carlsbad, CA, USA). The recombinant virus was screened and identified by selecting GFP-positive virus plaques. During screening, all the GFP positive plaques showed clear formation of syncytia among the infected cells, indicating that this modified virus might induce widespread cell membrane fusion. A total of six plaques were picked of which FusOn-H2 was selected for further characterization.

[0060] FIG. 2B depicts the step-wise construction of an embodiment of a FusOn-Affibody-PL, which was constructed by initially deleting the EGFP gene from FusOn-H2, and then inserting the Affibody-PL gene cassette (SEQ ID NO:9) in the region next to the modified ICP10 gene on the HSV-2 genome.

### Example 2

### Affibody-PL Engagement of Innate Immune Cells

[0061] Efforts were undertaken to demonstrate that Affibody-PL can actively engage innate immune cells to attack tumor cells when tested in vitro. First, the ability of Affibody-PL to selectively bind to tumor cells expressing HER2 was examined. A plasmid containing the gene cassette, pcDNA-Affibody-PL that was constructed by inserting the Affibody-PL into the pcDNA3 plasmid, or a control plasmid (pcDNA3-EGFP from Addgene) was transfected into 293 cells and supernatants were collected 24 hours (hr) later. The supernatants (100 ul) were added to three tumor cell lines (Skov3, derived from a serous cystoadenocarcinoma; MCF7; and MDA-MB-231) that express varying levels of HER2 to let Affibody-PL first bind to HER2 on tumor cell surface. After washing, FITC-conjugated anti-HA-tag antibody was added. The stained cells were then analyzed by flow cytometry and the results were shown in FIG. 3. As shown, Affibody-PL binds efficiently to Skov3 cells that express high level of HER2; more than 70% of cells stained positive. For MCF7 cells that express moderate levels of HER2, approximately half of the cells were positively stained. For the triple negative MDA-MB-231 breast cancer cells, only 3% of cells were positively stained. These results show that Affibody in the chimeric construct allows the molecule to bind strongly to HER2-expressing tumor cells.

[0062] Next, another in vitro experiment was conducted to test if Affibody-PL can initiate the anticipated intermolecular interactions shown in FIG. 1B to guide the innate immune cells to kill HER2-expressing tumor cells. To more closely mimic the actual in vivo situation, peripheral blood mononuclear cells, which contain NK cells and monocytes at the range of 5-20% and 10-30%, respectively were chosen as the source of innate immune cells. SKOV3 cells were mixed with PBMCs in the presence of immunoglobulins (Igs, from Sigma) and Affibody-PL-containing supernatant or the control supernatant. Twenty hours later, PBMCs were washed away, and the viability of tumor cells was initially examined by direct visualization under microscope after they were stained with 0.1% crystal violet-ethanol solution (FIG. 4A). The killing effect on tumor cells was further quantitated by lysing the cells in 2% SDS and the released dye was measured at 595 nM wavelength using Spectramax 5 plate reader (FIG. 4B). The results show that the presence of Affibody-PL led to a significant killing of tumor cells when compared to the mixture without this chimeric molecule. This effect was particularly obvious when the effector to target (E:T) ratio was relatively low (10:1) and the wells with the control supernatant show very little tumor cell killing while nearly 70% of cell killing was detected in the wells with Affibody-PL. With the E:T ratio at 20 to 1, there was a notable increase on the background killing in both wells with the medium alone and the control supernatant. However, the tumor cell killing in the wells with Affibody-PL was further increased to over 90 percent. Together, these results demonstrate the capability of Affibody-PL in guiding innate immune cells to kill tumor cells through a series of intermolecular engagements.

### Example 3

### Insertion of Affibody-PL Coding Sequence into an Oncolytic HSV and In Vitro Characterization of the Armed Virus

[0063] Next, the Affibody-PL coding sequence was inserted into the genome of an HSV-2-based oncolytic virus, FusOn-H2, through the homologous recombination as illustrated in FIG. 2A and FIG. 2B by a technique previously described in publications of certain of the inventors. See Fu, X., et al. FusOn-H2 is a mutant type 2 herpes simplex virus deleted for the protein kinase domain of the ICP10 gene and is a potent oncolytic virus (Mol Ther. 13(5) (2006) 882-90; Fu X, et al. “Construction of an oncolytic herpes simplex virus that precisely targets hepatocellular carcinoma cells” Mol Ther. 20(2) (2012) 339-46); each of which are incorporated herein by reference. The entire sequence of the derived FusOn-Affibody-PL is provided in SEQ ID NO: 17. The expression of Affibody-PL from the new virus, FusOn-PL, was confirmed by Western blot analysis of the supernatant collected from cells infected with the virus, which shows that Affibody-PL is abundantly expressed by FusOn-PL (FIG. 5A). The property of the Affibody-PL expressed from FusOn-PL was assessed by measuring its ability to bind to HER2-expressing tumor cells and its ability to guide innate immune cells to kill tumor cells in the same way as described in FIG. 3 and FIG. 4A-FIG. 4B, respectively, but using cells of murine origin instead. For tumor cells, the CT26 murine colon cancer cell line that had been stably transduced with HER2 was used. See Penichet M L, et al. “In vivo properties of three human HER2/neu-expressing murine cell lines in immunocompetent mice” Lab Anim Sci. 49(2) (1999) 179-88. For the effector cells, splenocytes harvested from immune competent Balb/c mice were used. Flow cytometry analysis on the binding of Affibody-PL produced from FusOn-PL to murine tumor cells expressing HER2 is shown in FIG. 5B. The experiment was similarly conducted as in FIG. 3, with the exception that a murine colon cancer cell line that was stably transduced with HER2 (CT26-HER2) was used. The results in FIG. 5C in which tumor cells were mixed with PBMCs, showed that, similar to those in FIG. 4B, a significant killing of tumor cells was observed in the well where supernatant containing Affibody-PL was added when compared to the other two wells without this ingredient. Together, these results demonstrate that Affibody-PL could also efficiently guide innate immune cells of murine origin to kill murine tumor cells if they express the targeted tumor antigen.

### Example 4

### Therapeutic Evaluation of FusOn-PL

[0064] To evaluate the therapeutic effect of FusOn-PL and to compare it with that of the parental FusOn-H2, the murine CT26 colon tumor model that is only marginally sensitive to the therapeutic effect of FusOn-H2 was chosen. This would allow the therapeutic benefit from the incorporated Affibody-PL to be fully evaluated. Specifically, a CT26 cell line that was stably transduced with the HER2 gene was used for this experiment. CT26-HER2 tumor cells were implanted subcutaneously to the right flank of syngeneic immune-competent BALB/c mice. Once tumors reached the approximate size of 5 mm in diameter, mice were treated intratumorally with the same dose of either FusOn-PL or FusOn-H2. Two mice from each group were euthanized at day 3 after treatment to collect tumor tissues for measurement of NK cell infiltration, and the remaining animals were kept for 4 weeks to evaluate the therapeutic effect by monitoring tumor size after treatment.

[0065] Immunohistochemical staining on the collected tumor tissues show that NK cells were only scarcely detected in the PBS-treated control tumors, a finding which is consistent with the reports in the literature that NK cells were mostly detected at the frequency of 1-3 per microscopic intratumoral field. As shown in FIG. 6A, NK cells were readily detectable in tumors treated with both FusOn-H2 and FusOn-PL, consistent with the reports that HSV-2 infection can trigger significant infiltration of NK cells to the infection site. Surprisingly, the presence of NK cells in tumor tissues treated with FusOn-PL was particularly profound and significantly more than those from FusOn-H2 treatment.

[0066] To determine if the increased presence of NK cells in FusOn-PL treated tumors was due to an enhanced local NK cell proliferation, the tumor tissues were doubly stained for both NK cell marker (NCR1) and Ki67 protein. The results presented in FIG. 6B showed that, although tumor cells were strongly stained with ki67 (particularly in the PBS treated tumor tissue), there was no significant Ki67 staining on NK cells in tumor tissues treated either with FusOn-PL or FusOn-H2. The results thus exclude the possibility of Affibody-PL in stimulating NK cell proliferation and suggest that the increased NK cell presence during FusOn-PL treatment is due to a positive feedback loop on their recruitment. Regardless, the increased presence of NK cells in FusOn-PL treated tumor tissues would allow the secreted Affibody-PL to act effectively to guide them to kill tumor cells

[0067] FIG. 7A showed the results from an in vivo experiment that was designed to directly compare the therapeutic efficacy of FusOn-PL with the parental FusOn-H2 by treating mice bearing tumors that were HER2 positive. The results show that administration of FusOn-H2 only slightly slowed down the tumor growth when compared with the PBS control. In contrast, FusOn-PL treatment effectively prevented tumor growth for an extended period of time. The treated tumors were significantly smaller than those in the FusOn-H2 treated group. By the end of the experiment, five out of the ten mice in FusOn-PL treated group were completed tumor free, while no tumor-free animals were detected in other treatment groups. Together, these results demonstrate that incorporation of Affibody-PL into an oncolytic HSV can enhance the antitumor effect of the virotherapy, and this potentiation strategy may be particularly beneficial to the patients in which the tumors are relatively resistant to the direct oncolytic effect of the applied virus.

[0068] The tumor-free mice in FusOn-PL treated group were subsequently challenged with fresh CT26-HER2 tumor cells implanted at the left flank. All three mice were completely protected and no trace of tumor was detected from the challenge for more than 4 weeks. The tumor challenge was not done to mice in the other two treatment groups, as all the mice had to be euthanized due to the large tumor burden. The challenged mice were kept for 4 more weeks to monitor tumor growth. No tumor formation was detected in any of the mice by the end of the experiment, indicating a robust antitumor immunity might have been generated from FusOn-PL treatment that subsequently provided the complete protection of these mice from tumor challenge.

[0069] Tumor cells contain frequent point mutations that can result in neoantigen formation. Inducing immune responses to these neoantigens is particularly appealing for cancer immunotherapy, as theoretically they are strictly tumor-specific. The neoantigen profile of CT-26 cells has recently been reported by Kreiter et al. See Kreiter S, et al. “Mutant MHC class II epitopes drive therapeutic immune responses to cancer” Nature 520 (7549) (2015) 692-6. To determine if FusOn-PL-mediated tumor cell killing could induce anti-neoantigen immunity, 3 mutated peptides (as listed in TABLE 1) that predictably contain MHC Class I neoantigen epitopes were initially chosen to examine if any cytotoxic T cells specific for these antigens could be detected in these protected mice. The splenocytes collected from the mice were stimulated with these peptides or a control peptide. The specificity of T cell response was determined by ELISPOT assay. The results show that splenocytes from one mouse reacted to a single peptide from this assay (FIG. 7B), indicating that induction of T cell response to these Class I neoantigen epitopes during FusOn-PL virotherapy could be detectable.

TABLE 1

| | | | | T | MHC |
|---|---|---|---|---|---|
| | | Mutated sequence | Muta- | cell | I |
| Name | Gene | synthesized | tion | type | score |
| CT26- | Tmem87a | GAIIVRGCSMPGPWRSGRL | G63R | CD8⁺ | 0.7 |
| M19 | | LVSRRWSVE | | | |
| | | SEQ ID NO: 18 | | | |
| CT26- | Als2 | GYISRVTAGKDSYIALVDK | L675I | CD8⁺ | 0.2 |
| M39 | | NIMGYIAS | | | |
| | | SEQ ID NO: 19 | | | |
| CT26- | E2F8 | VILPZAPSGPSYATYLQPA | I522T | CD8⁺ | 0.1 |
| M26 | | QAQMLTPP | | | |
| | | SEQ ID NO: 20 | | | |

[0070] To further characterize the neoantigen-specific immune response during FusOn-PL and FusOn-H2 virotherapy, the in vivo animal experiment shown in FIG. 6A and FIG. 6B was essentially repeated. The only difference was that all animals were euthanized at day 21 after virotherapy, when all animals were still alive, and the spleens from the animals were collected for further analysis of anti-neoantigen immunity. The therapeutic data collected from this second in vivo experiment showed that, even with this relatively short treatment period, FusOn-PL was still significantly more effective than FusOn-H2 at preventing the tumor growth at day 21 after the start of virotherapy (FIG. 8A), with approximately 40% of mice showing tumor-free by the end of the experiment.

[0071] The studies by Kreiter et al (supra) in three independent murine tumor models including CT-26 showed that the majority of the immunogenic mutanome was recognized by CD4+ T cells. To further characterize neoantigen-specific immunity, we chose a panel of MHC class II neoantigen peptides from the report by Kreiter et al. (listed in TABLE 2) to measure the antitumor immunity in these animals.

TABLE 2

| | | | | T | MHC |
|---|---|---|---|---|---|
| | | Mutated sequence | Muta- | cell | II |
| Name | Gene | synthesized | tion | type | score |
| CT26- | Aldh18a1 | LHSGQNHLKEMAISVLEARA | P154S | CD4⁺ | 0.05 |
| ME1 | | CAAAGQS | | | |
| | | SEQ ID NO: 21 | | | |
| CT26- | Ubqln1 | DTLSAMSNPRAMQVLLQIQQ | A62V | CD4⁺ | 0.24 |
| ME2 | | GLQTLAT | | | |
| | | SEQ ID NO: 22 | | | |
| CT26- | Slc4a3 | PLLPFYPPDEALEIGLELNSS | T373I | CD4⁺ | 0.9 |
| M20 | | ALPPTE | | | |
| | | SEQ ID NO: 23 | | | |
| CT26- | DHX35 | EVIQTSKYYMRDVIAIESAW | T646I | CD4⁺ | 0.1 |
| M37 | | LLELAPH | | | |
| | | SEQ ID NO: 24 | | | |

[0072] FIG. 8B shows the enumeration data of ELISPOT assay on these neoantigen peptides and the mixture of them. The controls include no peptide or an unrelated peptide (the ovalbumin Class II peptide (OVA 323-339). The results show that significant increase on ELISPOT staining was detected in the animals treated with FusOn-PL on all four Class II neoantigen peptides, although the magnitude of the response varies among the individual neoantigens (FIG. 8B). Taken together, these data demonstrate that tumor destruction by FusOn-PL can induce neoantigen-specific antitumor immunity on both Class I and Class II MHC epitopes, while the parental FusOn-H2 is less efficient in inducing such an immunity.

### Example 5

### HSV-1 Constructs Expressing PL

[0073] PL expressing constructs of HSV-1 oncolytic viruses was also accomplished where the tumor cell binding site was designed to be the epidermal growth factor receptor (EGFR). Alternative embodiments have an Affibody to a tumor cell antigen, such as but not limited to HER2 may be included in lieu of the EGFR. FIG. 9A shows a schematic of Synco-4 construction beginning with Synco-2D. As detailed in prior studies by the inventors and incorporated herein by reference, Synco-2D, is a HSV-1-based oncolytic virus, which was constructed by an intended process that can be summarized as: 1) deletion of both copies of the ICP34.5 gene (indicated as Δ34.5), 2) by insertion of the hyperfusogenic glycoprotein from gibbon ape leukemia virus (GALV.fus) into the Us3 gene (ultimately resulting in inactivation of this gene), and 3) insertion the bacterial artificial chromosome (BAC) into the intergenic region of UL46 and UL47. This virus can induce potent cell membrane fusion due to the intrinsic fusogenic phenotype as well as the insertion of GALV.fus.

[0074] More specifically, Synco-2D was constructed by a process starting with fHSV-Δ-pac, a BAC-based construct that contains a mutated HSV genome, in which the diploid gene encoding γ34.5 and both copies of HSV packaging signal were deleted. See Saeki, Y., et al. “Herpes simplex virus type 1 DNA amplified as bacterial artificial chromosome in Escherichia coli: rescue of replication-competent virus progeny and packaging of amplicon vectors. Hum. Gene Ther. 9 (1998) 2787-2794, 1998. Infectious HSV cannot be generated from this construct unless an intact HSV packaging signal is provided in cis; otherwise, the virus will be replication conditional due to the deletion of both copies of γ34.5. Thus the construct “Baco-1” was constructed by inserting a DNA sequence containing a HSV packaging signal and an enhanced GFP gene cassette into the unique Pad restriction site located in the BAC sequence in fHSV-Δ-pac, as described previously. See Fu et al. “Expression of a Fusogenic Membrane Glycoprotein by an Oncolytic Herpes Simplex Virus Potentiates the Viral Antitumor Effect, Molec Ther 7 (6) (2003) 748-754. To generate Synco-2D, Baco-1 was initially subjected to random mutagenesis. The syncytial phenotype was identified by screening the mutagenized virus on Vero cells. The circular form of viral DNA was then obtained from the new virus (Baco-F1) by extracting virion DNA from Vero cells shortly (1 h) after virus infection. The viral DNA was then transformed into the competent E. cell DH-10B through electroporation, and Baco-F1 DNA was purified from bacterial growth with the use of a Qiagen kit. To insert the hyperfusogenic glycoprotein gene of gibbon ape leukemia virus (GALV.fus) into Baco-F1, the gene cassette encoding GFP in Baco-F1 was replaced with GALV.fus (driven by the conditional UL38 promoter of HSV) through an enforced ligation strategy. The ligation mixture was directly transfected into Vero cells using LipofectAMINE (Life Technologies, Inc.) and incubated for 3-5 days to permit the generation of infectious virus. The resultant viruses were subsequently plaque-purified. See Nakamori, M., et al., “Effective Therapy of metastatic ovarian cancer with an oncolytic herpes simplex virus incorporating two membrane-fusion mechanisms” Clinical Cancer Res. 9(7) (2003) 2727-2733, which is incorporated herein by reference in its entirety. Subsequent characterization of Synco-2D led to the surprising finding that, despite this design, the GALV.fus gene cassette was inserted into the Us3 gene through unpredicted recombination.

[0075] For Synco-4 construction, a gene cassette was initially inserted into Synco-2D to replace the BAC sequence contained in the viral genome by homologous recombination. This enabled the new virus, Synco-47G, to be easily identified by the green color under microscope (as shown in FIG. 9B). A gene cassette that contains EGF-PL fusion gene (EGF ligand, SEQ ID NO:10) connected for in-frame expression to a Protein L (Protein L construct of SEQ ID NO:2) driven by the RSV-LTR and flanked by two LoxP sites (SEQ ID NO: 26 and SEQ ID NO: 27) was inserted into Synco-47G to replace the GFP gene, so that Synco-4 could be selected as a “white” virus from the “green” background.

[0076] As shown in FIG. 10, abundant expression and secretion of EGF-PL by Synco-4 was observed in 293 cells that were either transfected with a plasmid (pCR-ul47-EGFPL) that contains the EGF-PL gene cassette (as shown in FIG. 9A) or infected with Synco-4. 293 cells without either transfection or infection were used as a negative control. Forty-eight hrs after transfection/infection, supernatant was collected and the secreted EGF-PL was detected by Western blot analysis. The results show that there is an abundant presence of EGF-PL in the supernatant of 293 cells infected with Synco-4, indicating that the transgene is efficiently expressed by the virus.

[0077] As shown in FIG. 11A and FIG. 11B, EGF-PL produced by Synco-4 binds to EGFR expressed on tumor cells with high efficiency and specificity. The experiment in FIG. 11A was conducted by incubating the same supernatant harvested from pCR-ul47-EGFPL-transfected cells as mentioned above in with either CT26 or CT26-EGFR, followed by reaction with PE-conjugated Ig. The result shows flow cytometry of the staining for EGFR expression on CT-26-EGFR cells but not on other tumor cells. The experiment in FIG. 11B was conducted by incubating the same supernatant harvested from Synco4-infected cells as mentioned above in with either CT26 or CT26-EGFR, followed by reaction with PE-conjugated Ig. The result shows flow cytometry evidencing that EGF-PL in the supernatant of Synco-4 infection can strongly bind to CT26-EGFR cells, and the supernatant from the parental FusOn-H2 did not show any binding.

[0078] As shown in FIGS. 12A-G, Synco-4 can induce dose-dependent inhibition of tumor cell proliferation on Syrian Hamster adenocarcinoma cells (HaP-T1) (FIG. 12A), Murine breast cancer cells (4T-1) (FIG. 12B), Murine colon cancer cells (CT-26) (FIG. 12C), Human glioblastoma cells (U87) (FIG. 12D), Human pharynx squamous carcinoma cells (FaDu) (FIG. 12E), Human hepatocellular carcinoma cell (HEPG2) (FIG. 12F), and Human osteosarcoma cells (MNNG-HOS1) (FIG. 12G). HaP-T1 cell was obtained from European Collection Authenticated Cell Culture (ECACC). Other cell lines, 4T-1 cell, CT-26 cell, U87 cell, FaDu cell, HEPG2 cell, MNNG-HOS1 cell, were purchased from ATCC. For the experiment, 5000 cells/well were placed in 96-well plate and cultured overnight, culture media were removed and treated with 100 μl serum-free media containing various concentrations of Synco-4 from 0.003-3 multiplicity of infection (MOD. After 2 hr infection, media were removed and replaced with 100 μl culture media for continuous incubation for additional 48 hrs. Cells were detected with MTT assay kit (BioFloxx, Germany) followed manufacture's instruction. Briefly, 5 μl MTT solution (5 mg/ml) were added and incubated for 4 hrs in dark, then the media were removed and 150 μl DMSO was added. Then, the mixture was incubated at RT for 5 min with shaking, and the absorbance value (OD) thereof was determined at wavelength 490 nm. Cell viability was calculated by normalizing vehicle treatment and presented as inhibition rate. All experiments were repeated 3 times, n=3-6.

[0079] As shown in FIG. 13, Synco-4 has an enhanced antitumor activity over the parental Synco-2D against CT26-EGFR tumor. CT26-EGFR tumor cells were implanted subcutaneously to the right flank of Balb/c mice. Once tumors reached the approximate size of 5 mm size in diameter, mice were divided into 3 groups and treated with: 1) PBS at the same volume (100 μl), 2) 2×10⁷ pfu of Synco-2D, and 3) 2×10⁷ pfu of Synco-4. Tumor size was measured periodically and plotted. The results show that Synco-4 has an enhanced antitumor activity as compared with Synco-2D against CT26-EGFR tumor.

[0080] All publications, patents and patent applications cited herein are hereby incorporated by reference as if set forth in their entirety herein. While this invention has been described with reference to illustrative embodiments, this description is not intended to be construed in a limiting sense. Various modifications and combinations of illustrative embodiments, as well as other embodiments of the invention, will be apparent to persons skilled in the art upon reference to the description. It is therefore intended that the appended claims encompass such modifications and enhancements.

1. An improved oncolytic virus comprising an oncolytic virus backbone genetically modified to encode and direct secretion from infected cells of a chimeric molecule comprising a tumor cell binding component and an immunoglobulin (Ig) aggregator component, wherein the secreted chimeric molecule increases bystander tumor cell killing and anti-tumor immunity in the presence of anti-viral antibodies or other Igs and innate immune cells.

2. The improved oncolytic virus of claim 1 wherein the immunoglobulin aggregator component includes at least one Ig-binding kappa light chain binding domain derived from a Peptostreptococcal Protein L.

3. The improved oncolytic virus of claim 2 wherein the immunoglobulin binding component includes at least four or five Ig-binding “B” domains derived from a Peptostreptococcal Protein L.

4. The improved oncolytic virus of claim 1 wherein the oncolytic virus backbone is based on Herpes Simplex Virus Type 1 (HSV1).

5. The improved oncolytic virus of claim 1 wherein the oncolytic virus backbone is based on Herpes Simplex Virus Type 2 (HSV2).

6. The improved oncolytic virus of claim 1 wherein the tumor cell binding component is either an affibody, or a ligand, or a short peptide, or a single chain antibody, or a single domain antibody, that binds to a tumor antigen.

7. The improved oncolytic virus of claim 6 wherein the tumor antigen is selected from human epidermal growth factor receptor 2 (HER2), epidermal growth factor receptor (EGFR), Erb-B2 Receptor Tyrosine Kinase 3 (ErbB3), epithelial cell adhesion molecule (EpCAM), mesothelin (MSLN), MET protooncogene, insulin-like growth factor 1 receptor (IGF1R), ephrin receptor A3 (EphA3), TNF receptor apoptosis-inducing ligand receptor 1 (TRAIL-R1), TNF receptor apoptosis-inducing ligand receptor 2 (TRAIL-R2), vascular endothelial growth factor receptor (VEGFR), receptor activator of nuclear factor κβ ligand (RANKL), programmed death-ligand 1 (PD-L1), phosphatase of regenerating liver 3 (PRL-3).

8. The improved oncolytic virus of claim 1 wherein the tumor cell binding component is an extracellular domain of epidermal growth factor (EGF) that binds to an EGF receptor (EGFR) on tumor cells.

9. The improved oncolytic virus of claim 4, wherein the HSV1 backbone comprises at least one deletion of ICP34.5.

10. The improved oncolytic virus of claim 5, wherein the HSV2 backbone comprises an N-domain deletion of an ICP10 enabling selective replication in tumor cells

11. An improved oncolytic virus with increased bystander cell killing and induced anti-tumor immunity, the virus comprising an oncolytic herpes virus backbone genetically modified to encode an Affibody-Protein L (PL) cassette comprising an Anti-HER2 Affibody and a plurality of Protein L immunoglobulin binding domains fused together in frame to form an Affibody-PL that is engineered for extracellular secretion by cells infected with the oncolytic virus.

12. The improved oncolytic virus of claim 12, wherein the Affibody-PL cassette comprises a synthetic signal peptide (Sp), the anti-HER2 Affibody (Affibody), a linker, the plurality of Protein L immunoglobulin binding domains, and a growth hormone polyadenylation signal (polyA).

13. An improved oncolytic virus with increased bystander cell killing and induced anti-tumor immunity, the virus comprising an oncolytic herpes virus backbone genetically modified to encode an extracellular domain of epidermal growth factor (EGF) that binds to an EGF receptor (EGFR) on tumor cells and a plurality of Protein L domains fused together in frame to form an EGF-PL that is engineered for extracellular secretion by cells infected with the oncolytic virus.

15. A method of treating cancer comprising administering a therapeutically effective amount of the improved oncolytic virus of claim 12 and a diluent or carrier.

16. The method of claim 15, wherein the improved oncolytic virus comprises SEQ ID NO:17.

15. A method of treating cancer comprising administering a therapeutically effective amount of the improved oncolytic virus of claim 14 and a diluent or carrier.

16. The method of claim 15, wherein the improved oncolytic virus comprises SEQ ID NO:25.

17. A fusion protein comprising a tumor cell binding component and an immunoglobulin (Ig) aggregator component, wherein the immunoglobulin aggregator component includes at least one Ig-binding kappa light chain binding domain derived from a Peptostreptococcal Protein L.

18. The fusion protein of claim 17, wherein the at least one Ig-binding kappa light chain binding domain derived from a Peptostreptococcal Protein L has at least 80% amino acid identity with SEQ ID NO:29.

19. The method of claim 15, wherein the improved oncolytic virus is administered to one or more of pancreatic cancer cells, breast cancer cells, colon cancer cells, glioma cancer cells, head and neck cancer cells, liver cancer cells, and bone cancer cells.

The application's sequence listing, which the Patent Office published only in electronic form, follows.

SEQUENCE LISTING (36 sequences)

SEQ ID NO: 1 - DNA, 237 bp, Finegoldia magna
  misc_feature: Protein L domain
gtcgagaataaggaggaaaccccagaaacacccgagactgactctgaggaagaggtgaccatcaaggccaacctgattttcgctaatggatcaactcagaccgcagagttcaaaggcacctttgaaaaggccacaagcgaggcttacgcatatgccgacacactgaagaaagataacggcgagtacactgtggacgtggctgataaagggtataccctgaatatcaagtttgcagga

SEQ ID NO: 2 - DNA, 1104 bp, Finegoldia magna
gtcgagaataaggaggaaaccccagaaacacccgagactgactctgaggaagaggtgaccatcaaggccaacctgattttcgctaatggatcaactcagaccgcagagttcaaaggcacctttgaaaaggccacaagcgaggcttacgcatatgccgacacactgaagaaagataacggcgagtacactgtggacgtggctgataaagggtataccctgaatatcaagtttgcaggaaaggaaaaaacacctgaagagccaaaagaagaggtcactatcaaggcaaacctgatctacgccgatggcaaaacacagactgccgaattcaaggggacttttgaagaggctaccgcagaggcctacagatatgctgacgcactgaagaaagacaatggggagtacaccgtggacgtggccgataagggatacacactgaatattaagttcgctggcaaggagaaaactcccgaagagcctaaagaggaagtgaccatcaaggctaatctgatctacgcagacgggaaaacccagacagccgaattcaagggaacatttgaagaggccactgctgaggcataccgctatgcagatctgctggccaaagaaaacggcaagtacacagtggacgtggcagataaaggctatactctgaatatcaagtttgccgggaaggagaaaaccccagaagagcccaaagaagaggtgacaatcaaggccaacctgatctacgctgacggaaagactcagaccgccgagttcaagggcacctttgccgaagctacagcagaggcctaccggtatgctgatctgctggcaaaggagaacggcaagtacactgctgacctggaggatggcgggtatacaatcaatattagattcgccgggaagaaagtggacgaaaaacctgaagagaaggagcaggtcaccatcaaggaaaacatctactttgaggatgggaccgtgcagacagctactttcaagggaacttttgctgaagcaaccgccgaggcttacagatatgccgacctgctgagcaaagagcatggcaagtataccgccgacctggaggacgggggatacaccatcaacattagatttgctgga

SEQ ID NO: 3 - DNA, 174 bp, Artificial Sequence
  Anti-HER2 affibody
gtggacaacaagttcaacaaggagatgagaaacgcttactgggaaatcgcactgctgcctaacctgaataatcagcagaaaagggctttcatccgatccctgtacgacgatccaagccagtccgccaacctgctggcagaggctaagaaactgaatgacgcacaggcccctaag

SEQ ID NO: 4 - DNA, 624 bp, Rous sarcoma virus
tcatgtttgacagcttatcatcgcagatcctgagcttgtatggtgcactctcagtacaatctgctctgctgccgcatagttaagccagtatctgctccctgcttgtgtgttggaggtcgctgagtagtgcgcgagcaaaatttaagctacaacaaggcaaggcttgaccgacaattgcatgaagaatctgcttagggttaggcgttttgcgctgcttcgcgatgtacgggccagatatacgcgtatctgaggggactagggtgtgtttaggcgcccagcggggcttcggttgtacgcggttaggagtcccctcaggatatagtagtttcgcttttgcatagggagggggaaatgtagtcttatgcaatacacttgtagtcttgcaacatggtaacgatgagttagcaacatgccttacaaggagagaaaaagcaccgtgcatgccgattggtggaagtaaggtggtacgatcgtgccttattaggaaggcaacagacaggtctgacatggattggacgaaccactgaattccgcattgcagagataattgtatttaagtgcctagctcgatacaataaacgccatttgaccattcaccacattggtgtgcacctccaagctggg

SEQ ID NO: 5 - protein, 21 aa, Artificial Sequence
  signal peptide (synthetic)
MWWRLWWLLLLLLLLWPMVWA

SEQ ID NO: 6 - DNA, 87 bp, Artificial Sequence
  Linker - HA tag
ctcgagccaaaatcttgcgataagacccacacatgccccccttgtcccggatcctacccttatgacgtgccagattatgcctgtaca

SEQ ID NO: 7 - DNA, 215 bp, Bos taurus
gcctcgactgtgccttctagttgccagccatctgttgtttgcccctcccccgtgccttccttgaccctggaaggtgccactcccactgtcctttcctaataaaatgaggaaattgcatcgcattgtctgagtaggtgtcattctattctggggggtggggtggggcaggacagcaagggggaggattgggaagacaatagcaggcatgctgggga

SEQ ID NO: 8 - DNA, 2247 bp, human herpesvirus 2
atgagcggccgcttaattaaccacacgccctatcatctgagggagtatgcgacgcggctggttaacgggttcaaacccctggtgcggcggtccgcccgcctgtatcgcatcctgggggttctggtccacctgcgcatccgtacccgggaggcctcctttgaggaatggatgcgctccaaggaggtggacctggacttcgggctgacggaaaggcttcgcgaacacgaggcccagctaatgatcctggcccaggccctgaacccctacgactgtctgatccacagcaccccgaacacgctcgtcgagcgggggctgcagtcggcgctgaagtacgaagagttttacctcaagcgcttcggcgggcactacatggagtccgtcttccagatgtacacccgcatcgccgggtttctggcgtgccgggcgacccgcggcatgcgccacatcgccctggggcgacaggggtcgtggtgggaaatgttcaagttctttttccaccgcctctacgaccaccagatcgtgccgtccacccccgccatgctgaacctcggaacccgcaactactacacgtccagctgctacctggtaaacccccaggccaccactaaccaggccaccctccgggccatcaccggcaacgtgagcgccatcctcgcccgcaacgggggcatcgggctgtgcatgcaggcgttcaacgacgccagccccggcaccgccagcatcatgccggccctgaaggtcctcgactccctggtggcggcgcacaacaaacagagcacgcgccccaccggggcgtgcgtgtacctggaaccctggcacagcgacgttcgggccgtgctcagaatgaagggcgtcctcgccggcgaggaggcccagcgctgcgacaacatcttcagcgccctctggatgccggacctgttcttcaagcgcctgatccgccacctcgacggcgagaaaaacgtcacctggtccctgttcgaccgggacaccagcatgtcgctcgccgactttcacggcgaggagttcgagaagctgtacgagcacctcgaggccatggggttcggcgaaacgatccccatccaggacctggcgtacgccatcgtgcgcagcgcggccaccaccggaagccccttcatcatgtttaaggacgcggtaaaccgccactacatctacgacacgcaaggggcggccatcgccggctccaacctctgcaccgagatcgtccacccggcctccaagcgatccagtggggtctgcaacctgggaagcgtgaatctggcccgatgcgtctccaggcagacgtttgactttgggcggctccgcgacgccgtgcaggcgtgcgtgctgatggtgaacatcatgatcgacagcacgctacaacccacgccccagtgcacccgcggcaacgacaacctgcggtccatgggcattggcatgcagggcctgcacacggcgtgcctcaagatgggcctggatctggagtcggccgagttccgggacctgaacacacacatcgccgaggtgatgctgctcgcggccatgaagaccagtaacgcgctgtgcgttcgcggggcgcgtcccttcagccactttaagcgcagcatgtaccgggccggccgctttcactgggagcgcttttcgaacgccagcccgcggtacgagggcgagtgggagatgctacgccagagcatgatgaaacacggcctgcgcaacagccagttcatcgcgctcatgcccaccgccgcctcggcccagatctcggacgtcagcgagggctttgcccccctgttcaccaacctgttcagcaaggtgaccagggacggcgagacgctgcgccccaacacgctcttgctgaaggaactcgagcgcacgttcggcgggaagcggctcctggacgcgatggacgggctcgaggccaagcagtggtctgtggcccaggccctgccttgcctggaccccgcccaccccctccggcggttcaagacggccttcgactacgaccaggaactgctgatcgacctgtgtgcagaccgcgccccctatgttgatcacagccaatccatgactctgtatgtcacagagaaggcggacgggacgctccccgcctccaccctggtccgccttctcgtccacgcatataagcgcggcctgaagacggggatgtactactgcaaggttcgcaaggcgaccaacagcggggtgttcgccggcgacgacaacatcgtctgcacaagctgcgcgctgtaa

SEQ ID NO: 9 - DNA, 1443 bp, Artificial Sequence
  Affibody-PL gene cassette
atgtggtggaggctgtggtggctcctgctgcttcttctgctcctctggcccatggtgtgggccgaattggtggacaacaagttcaacaaggagatgagaaacgcttactgggaaatcgcactgctgcctaacctgaataatcagcagaaaagggctttcatccgatccctgtacgacgatccaagccagtccgccaacctgctggcagaggctaagaaactgaatgacgcacaggcccctaagctcgagccaaaatcttgcgataagacccacacatgccccccttgtcccggatcctacccttatgacgtgccagattatgcctgtacagtcgagaataaggaggaaaccccagaaacacccgagactgactctgaggaagaggtgaccatcaaggccaacctgattttcgctaatggatcaactcagaccgcagagttcaaaggcacctttgaaaaggccacaagcgaggcttacgcatatgccgacacactgaagaaagataacggcgagtacactgtggacgtggctgataaagggtataccctgaatatcaagtttgcaggaaaggaaaaaacacctgaagagccaaaagaagaggtcactatcaaggcaaacctgatctacgccgatggcaaaacacagactgccgaattcaaggggacttttgaagaggctaccgcagaggcctacagatatgctgacgcactgaagaaagacaatggggagtacaccgtggacgtggccgataagggatacacactgaatattaagttcgctggcaaggagaaaactcccgaagagcctaaagaggaagtgaccatcaaggctaatctgatctacgcagacgggaaaacccagacagccgaattcaagggaacatttgaagaggccactgctgaggcataccgctatgcagatctgctggccaaagaaaacggcaagtacacagtggacgtggcagataaaggctatactctgaatatcaagtttgccgggaaggagaaaaccccagaagagcccaaagaagaggtgacaatcaaggccaacctgatctacgctgacggaaagactcagaccgccgagttcaagggcacctttgccgaagctacagcagaggcctaccggtatgctgatctgctggcaaaggagaacggcaagtacactgctgacctggaggatggcgggtatacaatcaatattagattcgccgggaagaaagtggacgaaaaacctgaagagaaggagcaggtcaccatcaaggaaaacatctactttgaggatgggaccgtgcagacagctactttcaagggaacttttgctgaagcaaccgccgaggcttacagatatgccgacctgctgagcaaagagcatggcaagtataccgccgacctggaggacgggggatacaccatcaacattagatttgctggagtcgactga

SEQ ID NO: 10 - DNA, 159 bp, Homo sapiens
aatagttactctgaatgtcccccttcctacgatgggtactgcctccatgatggagtgtgcaggtatattgaagcactggactcctatgcatgcaactgtgtggtcggctacgccggggagcggtgtcagtaccgggacctgaggtggtggggaaggcgc

SEQ ID NO: 11 - DNA, 20 bp, human herpesvirus 2
ttggtcttcacctaccgaca

SEQ ID NO: 12 - DNA, 18 bp, human herpesvirus 2
gacgcgatgaacggaaac

SEQ ID NO: 13 - DNA, 20 bp, human herpesvirus 2
acacgccctatcatctgagg

SEQ ID NO: 14 - DNA, 20 bp, human herpes virus 2
aacatgatgaaggggcttcc

SEQ ID NO: 15 - DNA, 18 bp, Artificial Sequence
  CMV promoter-EGFP PCR amplification primer
atggtgagcaagggcgag

SEQ ID NO: 16 - DNA, 20 bp, Artificial Sequence
  CMV promoter-EGFP PCR amplification primer
cttgtacagctcgtccatgc

SEQ ID NO: 17 - DNA, 158483 bp, Artificial Sequence
  Entire sequence of FusOn-Affibody-PL
  Affibody-PL coding sequence (89098)..(90540)
agtccccgtcctgccgcgcgggggcgggcgcgggaaaaaagccgcgcgggggcgcccgcgggaaggcagccccgcggcgcgcggggggaggggcggcgcccgcgggggagcggccggctccgggggagggacggggaagggggcgcgcggggctgccctgccgcccgcccgccgccgccgcccgccttcgcgcccccccccaaaaaacaccccccccgggggttgactccccgggggaaaagaggcggggcgggagtccccgtcctgccgccgccccttaagagggcccgcaacacggcccgggctgcgcacgccagccgggacgggtgagttcgctaggcaagcacggactggcggttacacgtgcatgcgtgccgagtgaactctcccgccccgacgcgctccggctccgggcctacgccgagcccagccgcccgccatgtcccgccgccggggtccccgccgccggggtccccggcgccggccgcgccccggcgctccagccgtgccgcgccccggcgctccagccgtgccgcgccccggcgcgctcccaaccgcagactcccaaatggtccctgcgtacgactcgggaaccgcggtcgagagcgcgccggccgcgtcctcgctcctgcggcgctggctgctggtgccccaggcggacgacagcgacgacgcggactacgccggcaacgacgacgcagagtgggcgaacagccccccgagcgagggcggggggaaggcgccggaggccccgcacgccgcgcctgccgccgcctgccccccgccgccgccgcgcaaggagcgcgggccgcagcgcccccttccgccccacctggcgctacggctgcgcaccacgacggagtacctggcgcgcctgagcctgcgccggcggcggccccccgcgtccccgcccgcggacgcgccgcgcgggaaggtacgcctcccctccgaccccctgacgcccctccgaccccctgacgcccctccgaccccctgacgcccctccgaccccctgacgcccctccgaccccctgacgcccctccgaccccctgacgcccctccgacccccgtgtctccccgcccgcaggtgtgcttctcgccgcgcgtgcaggtgcgccatctggtggcctgggagacggccgcgcgcctggcccgacgggggtcctgggcgcgcgagcgggccgaccgcgaccggttccggcgccgcgtggcggcggccgaggcggtcatcggaccgtgcctggagcccgaggcccgagctcgggcccgagcccgagcccgggcccacgaagacggcggacccgcggaggaggaggaggcggcggcggcggcgcgcgggtcctccgccgccgcgggcccgggccgtcgggcggtctagggttgaaccggcgagggcggcctcggccggcggagccccggagctccgaaggtctgcgcgaggccgctctccgaagagacgatgggagccccgcgtatatatccgcgagggcccggcgccgccccgccgctccgcccgccccagggggcggcgccggccaaccgcgcgccgccgcgcgggcccggactccgccccggcgaccgccccgcgccggcttcccggtatggtaattagaaacttttaataggcggtcccggccgccatccccgcgcatggtaattagcaacttttaatgggccggcgttcccgctcgcggtaattagcagcttttaacgggccgccattcccgcttatggtaattaaaaacgttcggacggcccctcgctccccgcgtaattactccctcggggttccgggttatgctgattactttcttggcagaacacgcagagcctcgcgcgccgccgggtgggtgggctgatcggcccctattggtcccctgggcttcctagtatgctaatgaatttttccccgggggcgggcaccactcagggccgcgccggcggggcgccggggggactcccatctgcgtcggcggggggcggcgcatgctaatggggttcttggagtacacccggttggtccccggggacggggccgccccgagagggggggattccctccctccgcccccgccggggcgcgcggctattgggggaatcgtaaatgccgcccctttgggggagtggataggcgccgggtataaggcagccccgtgtgacggtcgggccgcattcgcaccccggcactgcgagcgacggagcggcggcccggcgggaggaggagacccggagagacagagactaaaacccggcaagagagagaccgcgggccgccgtctcgagtctaccctaccccggctcatggaaccccggcccggcacgagctcccgggcggaccccggccccgagcggccgccgcggcagacccccggcacggtgagagggcgacccccgggtctcaggcccccccttttccccggaccacccggctgcgggttgggggtggtcgcgggcggtgggctcgggggcggggacgcttgacggggccgacccccggcccgcttaagcggtcgggggacccccgtgggccgtgcgccgccccccgaccctctgggggggcgagggaggcagggaggagcccgagagcgggggacagggggggagacgaggggtcggaatccaaaggacgcagaccacctttggttacggacccctttctcccccccttccgaacaaaaagcagcgggcggggggccggggtgagggagggacacgggggacacggcgcgggggtcccgcctcacgccccgcgccctctaaatcccccccgttgctttgtcaagcagcccgccgccccgcacgcctgggggatgctcaacgacatgcagtggctcgccagcagcgactcggaggaggagaccgaggtgggaatctctgacgacgaccttcaccgcgactccacctccgaggcgggcagcacggacacggagatgttcgaggcgggcctgatggacgcggccacgcccccggcccggcccccggccgagcgccagggcagccccacgcccgccgacgcgcagggatcctgtgggggtgggcccgtgggtgaggaggaagcggaagcgggaggggggggcgacgtgtgtgccgtgtgcacggacgagatcgccccgcccctgcgctgccagagttttccctgcctgcaccccttctgcatcccgtgcatgaagacctggattccgttgcgcaacacgtgtcccctgtgcaacaccccggtggcgtacctgatagtgggcgtgaccgccagcgggtcgttcagcaccatcccgatagtgaacgacccccggacccgcgtggaggccgaggcggccgtgcgggccggcacggccgtggactttatctggacgggcaacccgcggacggccccgcgctccctgtcgctggggggacacacggtccgcgccctgtcgcccacccccccgtggcccggcacggacgacgaggacgatgacctggccgacggtgagggcgggcgggggtcgggcggggggcgggcgggggtcgggcgggggtcgggcgggggtcgggcgggggtcgggcgggggtcgggcgggggtcgggcgggggtcgggcgggggtcgggcgggggtcgggcgggggtcgggcactaaccgggggctcccgtctctgtctccctctgcagtggactacgtcccgcccgccccccgaagagcgccccggcgcgggggcggcggtgcgggggcgacccgcggaacctcccagcccgccgcgacccgaccggcgccccctggcgccccgcggagcagcagcagcggcggcgccccgttgcgggcgggggtgggatctgggtctgggggcggccctgccgtcgcggccgtcgtgccgagagtggcctctcttccccctgcggccggcggggggcgcgcgcaggcgcggcgggtgggcgaagacgccgcggcggcggagggcaggacgccccccgcgagacagccccgcgcggcccaggagccccccatagtcatcagcgactctcccccgccgtctccgcgccgccccgcgggccccgggccgctctcctttgtctcctcctcctccgcacaggtgtcctcgggccccggggggggaggtctgccacagtcgtcggggcgcgccgcgcgcccccgcgcggccgtcgccccgcgcgtccggagtccgccccgcgccgccgccgcccccgtggtgtctgcgagcgcggacgcggccgggcccgcgccgcccgccgtgccggtggacgcgcaccgcgcgccccggtcgcgcatgacccaggctcagaccgacacccaagcacagagtctgggccgggcaggcgcgaccgacgcgcgcgggtcgggagggccgggcgcggagggaggacccggggtcccccgcggcaccaacacccccggtgccgccccccacgccgcggagggggcggcggcccgcccccggaagaggcgcgggtcggactcgggccccgcggcctcgtcctccgcctcttcctccgccgccccgcgctcgcccctcgccccccagggggtgggggccaagagggcggcgccgcgccgggccccggactcggactcgggcgaccgcggccacgggccgctcgccccggcgtccgcgggcgccgcgcccccgtcggcgtctccgtcgtcccaggccgcggtcgccgccgcctcctcctcctccgcctcctcctcctccgcctcctcctcctccgcctcctcctcctccgcctcctcctcctccgcctcctcctcctccgcctcctcctcctccgcctcttcctctgcgggcggggctggtgggagcgtcgcgtccgcgtccggcgctggggagagacgagaaacctccctcggcccccgcgctgctgcgccgcgggggccgaggaagtgtgccaggaagacgcgccacgcggagggcggccccgagcccggggcccgcgacccggcgcccggcctcacgcgctacctgcccatcgcgggggtctcgagcgtcgtggccctggcgccttacgtgaacaagacggtcacgggggactgcctgcccgtcctggacatggagacgggccacataggggcctacgtggtcctcgtggaccagacggggaacgtggcggacctgctgcgggccgcggcccccgcgtggagccgccgcaccctgctccccgagcacgcgcgcaactgcgtgaggccccccgactacccgacgccccccgcgtcggagtggaacagcctctggatgaccccggtgggcaacatgctctttgaccagggcaccctggtgggcgcgctggacttccacggcctccggtcgcgccacccgtggtctcgggagcagggcgcgcccgcgccggccggcgacgcccccgcgggccacggggagtagggggagctaacactcggcttgctgcccgaaggaagccgccccccaccggaccaccggccgaggcgcctcgggggcagggggaggtggggggggggaaagacggggaggagacaggaagtgggggtgggagtgggggggggggacggacacggccccgaacagcaacacacaccagcattttgttatggactttctggccttgttgaaaacttgaggaaaaaaaaaactttatatttataaaaattttacaataaagttttgtgatgcttttgacacactttgttgttggcctttgatgcagctcccccgcgcaggggggccggggatgggggggaagggaggaggaggagggggggcgggcacgagaagccgcccccacccccgaggcctgttggtctttatcatagaacagagccggggcccggcctcgttctggctccctgtcttggtgggtgggcgggctggctggcgggtaaaaaaagagtgtgtccgtgttgacagggaggggggcccgatcgtgcagagcacgcacgtctggccggccagaccctgggggtggtgggcaggagtgggagggcgcctggctcggggagggaggagggggggggtcagccgcaccaccggcgcgaagccaggggccagggaactttgatagagaggggggaaagtggggcgggggcgagggcggttgaatcacaacgcatgcacgccctctgcccccggggacgggtgggaggaaggaggagggagaagagaagacccgaggcatgcacccgcacttacgcccgtgcccacccccgccccggcgcccaccccgcccgcacacctgcccgccacgcccgcccctcctcaccctggctgggagaaaggaggaggagcaggaagaggagacccgaggcatgcaaccgcactcaccccaccccgcccgcacacctgcccgccacgcccgcccctccttaccctggctgcggggagactcccatcggggcgagggggctcgcgcgttcgcaacaccacaccacaccacacggcccaccacaacacggcccaccacgacacaacacgacacgacgcgttttgcggggcatgcaagtcgacacaccgcgcgcgtgcctacctttccctagcggccccggcccccggcccgtttccttccgccaccactaccaccacccccccgcccgcgcccacgcggtagaggaaggggacgggcgccacacccacggctgtggccgggcacgcgcctttggggttgttgggggggggtgaccggcgcgtgggggcggtgggcgtacgggcccgacccgcgcctgcccccccgggaacgacgacgggggggggggaaacgggggtgggtggaagggaagaggaaggagaaagggggggtggatccgaacacgccggatccgcgaaaataataacaaaacaaacaaaaacagaaacaaaaacaaaaacacctagaaaaaaaggatacgggttggctcgcgggcggtgcggctgacctgcctgccctttctgggacccccgcctcgtgtttcttgaaagggggaggaagaacagttctcccccaacccctgctctcttctctcttccgcccgccccccccccctctccccgccgcctcagcagaagctcacctgtacgaccctaaacctacctgcgagaacgcgcggcgttcgaggggcgcgctctctcacacgagacacacgcaggcgccccccccccccggagcctgggtcccccggcggacggctcacgcggcgcggcgtctcggtgggacgcgggcaaagggcggcggcggcgggggggggggggggaaatgtgaggagagcgagacagagagagagaaggaagagggaaggggcgcggcgggacgggggaagacgaggagaagggaaggggcgagggtcgggcccgggagcggggcggcccgggagggagaagaaacggaacgcggaaacgccgccggcgcggcccggggccccggggcccccgcgctccgccgggggcccgggccggaccgccgggcgggggacgccttccgcccggcgccgggcggctacccgggacccccggccgggaatcgaaaaaagcctccgggggcccctttcgcgcctttcgcgaacgcgcggcgccggagggggcggccgccgaggtgcgggggcccctccggccggggcgcacctcggcggccaagccccggcccgcccgggggtccccgaggcaagaggcggaccctcggaggcgcggaagaagacgggaggcgggggaaaaaagggggaagagagggggaggtagggaggggagaggagaagggcgcgccggtgcgcggagcagccttccttctccggagtccctctcgatcggcggcgggcccctgcgttcgttgctgccgcgcccccggttttataaagacagggatgacgcagcagaaatgcccacagcaacacgcgggcggggctcgggctctccggcggcttaatggatctccgggcacggcgcccgcaaccgcagagcactcagctggcgcgcccccccccaacgtgggagtgtttaatggaagggcgtggggccggccgccggatgcccgcgggggcctaatgcggcgggaggcgtgggccgctggcgccgcggcccgtctgctggcccgcggcccgtctgctggcccgcggccacgtaaacaatgacacaggggttctctccgccgcggccggcgcggggcgttgccggcccggcccggccccggagcccgcggcgctgctcggctgcggccgcgggctccgggggctccgcactctgcccggctcgccccgtcccccctcttgctgcttttccgcgcgcctctctttcccgttgctttccctctccccccccccccctctctctctctctctctctctctccgccatcctcccgcccggccgcccactccccgctcggcctctccggctgcggtgcttgggtctccttcgtcgggcggcggggggggggcgtcgggactcgcggagggccggagaatggaaggcgaggggatgcaggaggaggatcgggactccccatcttctgcccttccatcctccgtttttccgctttccaccgccgccgccaccacccccccttccttcgcccgcccgcctcgccccggacccctcccccccgtgttccccccatcgttcaccaccacgccccccaccgcgccttggctgtttggggggtggcggcggtggtcggcgtgctgccggaggctgcgggcgcggggtaggtgggtgggcgggtggtgggggggggcccggctgcgtctcgccgcgatcccgccggtggggcgcggcggcggtcggggtggggggagagtgtcgtgggtgtgttttcgtgtcccccaccaccactcccaccccgaccgccgccgcgcccgcgtttctgccgcccgcgcgctcctgtgtggaccccggggtgggcggcgggggggggtgccgtgggtgtggcggcggggcgcgggccggggccggggctcgctggtccgccgaagtaaagaaaagatcgccaccgtgtgttcgtctgtgtgttctgcgcggcgccggggcccccctgccgggcggggcggtggggcggggtcggggtcgcggcggggaaggaaggaaagaccccggaagcgccgggagggggcgccggcgcgacgcgggcggccgggcgggggcgcgcggcggccgggcgggggcgcgcggcggccgggcgggggcgcgcggcggccgggcgggggcgcgcggcggccgggcgggggcgcgcggcggccgggcgggggcgcgcggcggccgggcgggggcgcgctttccccgcgtcgcccctcgggttcccaagacctatcacgtgtgcgcaggggaggggaggacgcgggggaggggaggacgcgggggaggggaggacgcgggggatatataaagcggtagaaagcgcgggaatgggcatattggacccgcgtgattcggttgctcgcggttgtcttgtttggacgttttttatgcgggaacaagggggcttaccggttacactgtccgctcgctatggggttcgtctgtctgtttgggcttgtcgttatgggagcctggggggcgtggggtgggtcacaggcaaccgaatatgttcttcgtagtgttattgccaaagaggtgggggacatactaagagtgccttgcatgcggacccccgcggacgatgtttcttggcgctacgaggccccgtccgttattgactatgcccgcatagacggaatatttcttcgctatcactgcccggggttggacacgtttttgtgggataggcacgcccagagggcgtatctggttaacccctttctctttgcggcgggatttttggaggacttgagtcactctgtgtttccggccgacacccaggaaacaacgacgcgccgggccctttataaagagatacgcgatgcgttgggcagtcgaaaacaggccgtcagccacgcacccgtcagggccgggtgtgtaaactttgactactcacgcactcgccgctgcgtcgggcgacgcgatttacggcctgccaacaccacgtcaacgtgggaaccgcctgtgtcgtcggacgatgaagcgagctcgcagtcgaagcccctcgccacccagccgcccgtcctcgccctttcgaacgcccccccacggcgggtctccccgacgcgaggtcggcgccggcatactcgcctccgacgcaactagccacgtctgcatcgcaagccaccctgggtcgggagcaggacagccgacccgtctagcggccgggtcggctgtccagcgtcgtcgccctagaggctgtccgccgggcgtgatgttttccgcatctacgacccccgaacagcccctggggctgtcgggcgatgcgacgccgcccctgccgacttccgtgcccctggactgggccgcgtttcggcgcgcgtttctgatcgacgacgcctggcggcccctgttggagccggagctcgcgaaccccctaaccgcgcgcctcctcgcggagtatgaccgtcggtgccagaccgaagaggtgctgccgccgcgggaggatgtgttctcctggacgcggtattgtacccccgacgacgtgcgcgtggttatcatcgggcaggacccgtaccaccatcccggccaggcgcacggcctggcgtttagcgtgcgtgcggatgtgccggtgcctccgagtctacggaacgtgctggcggcggttaaaaattgttaccccgacgcgcgcatgagcggccgcggctgcctggaaaagtgggctcgcgacggcgtgctgttgttgaacacgaccctgaccgtcaagcgcggggcggcggcgtcccactccaagcttggatgggaccgttttgtgggcggggtggtccaacggctggccgcgcgccgcccgggcctggtctttatgctctggggcgcccatgcccagaacgcgatcaggcccgaccctcgccaacactacgtcctcaagttttctcacccgtcgcccctctccaaggtcccgtttgggacgtgccagcatttcctcgccgcgaatcgctacctcgaaacccgggacattatgccgatcgactggtcggtataagatgccgacatccggggtcttgatttacgagggggcaattaataaagactgttgatggttaaatctcgggtctcataccggtccgtgatgtcgggcgtgggggaagagagggtcccctctgcgtttactatccttgcctcgtggggctggacgtttgcaccccagaaccatgatcctggcgcgtcgccgaatacgacgcccatagagtcgattgcggggaccgcaccggacgcgcacgtggggcctctcgacggagagccggaccgggatgcgatctccccgcttacgtcgagcgtggccggcgacccgccgggggcggacggcccctacgtcacctttgatactctgtttatggtatcttcgatcgacgaactggggcgccgccagctcacggatacgatccgtaaggacctgcggctgtcgctggccaagttcagcatcgcgtgtaccaagacctcgtcgttttcggggacggccgcgcgccagcgcaagcgcggagcaccgccgcaacgcacatgcgtaccacgcagcaacaagagcctccagatgttcgttttgtgcaagcgcgccaacgccgcgcaggtgcgcgagcagctgcgggcggttattcggtcgcgcaagccgcgcaagtattacacgcggtcctcggatgggcggctctgcccggccgtccccgtgtttgtacacgagtttgtttcgtccgaacccatgcgcctccatcgagataacgtcatgctgtctacggaaccagactaagcacccccgccgtcccctttcttttccccctacccttcccccgttactgatgtgttgtacgtttcaataaataacacgtagcttattttgttggatgatggattgattgattttattgaccgttcgttcgcccggcggtgccgtcgccgcgcgcagagggaatatgcaagcgggcggggtggggaggaaagaaggtttcaggttccgggggttgggtctgcgtcgtccagggtggggctgatctgaatttcccgcagaacctcgaccagtaggtctgttgtgtttgctgggaactcgcccgccgttggggatacgggggcggggggtgtggtcgggcggacgtccaggggtgcgttatcgcacccccgcgccgcctcgggggccgtcccgtagatcgttgcggtgatgtagatggtgtccggggtccacaccaccgtcaggatgccggccgtcgcactccggacgctttcgccgtgcgatgagctgacccaggagtcaaaggggtacgcgtacatatgggcgtcccaccagcgctccagcctctgggtactagcgcgtcctataaagcggtatgcgcaaaattcggcacgacagtcgataatcaccagcagcccgatgggggtgtgttgtatcaccacgcctccgcggggcaggcggtcctggcgcgctcgaccccgcgtcagaaccgcgcgcgtccctgactcaaacacgtgcaccacctgtgccgcgtccggcagcgcgctcgttagcgacgccctggggtgatgtaggctgtacgcgatggtcgtctgggggttccccatgtctcgggggggtgggggtgaatgtcacccggcccgggtgcggtgggaacgcgagggaatggagggttaatagacaatgaccacattcggatcgcgtagagcagatagtatgtgctcgctaatgacgtcatcgcgttcgtggcgctcccggagcgggtttagattcatgtgcaggaactcggatgaggtggtgcgggacatggctacgtacgcgctgtttaggcgcaggtttccgggcgtgaagcatatggcgaccttgtccagactgagcccctgggagcgcgtgatggtcatcgcgagtttggagctgatgccgtagtcggcgttgatggccatggccagctccgtggagtcgatcgactcgacaaactcactgatgttggtattgacgacagacatgaagccgtgctggtcccgcaggacgatgtagggcaggggggactcctccaagaactcggccacgccggccgtcgcgtgccgccgccgcagctcctccgcgaacgcgaacacccgggtgtacgtgtaccccatcagcgtgtagttgtccgtctgcagggccacggacatcagccccccgcgcggcgagccggtcagcagctcgcagccccggaaaatgacattgtccacgtaggtgctgaagggggcgctctcaaacacctccccgaagagctcccgtaggataaggtatcgccccagaaaggccctcttcaggagcccaaactgggcgtggacggccgcggtggtctcaggctcttcgagggcgtagtggcagtagaacacgtccagctgctgttcgtccagcccggcgaagataacgtcaaggtcgtcgtcggggaagtcgtccgggcccccgtcccgcgggcccaggtgcttaaaattgaacgcacgctcccccggagagcggtcgctggtgtcggcggccctggttgccgatgcgccggcggcgtcccggcgtagcgacaggagttctgccgtcagctcccctaggcggccgtaggccagggtcctctgggtcgcgtccaggccggggcgctggagaaagttgtaaaagtgaatcagcccgccgaacatgagccgcgacaggaaccggtaggcgaactccaccgaggtctccccctgggtcttcacgaagctgtcgtcgcgcagcacagcctcgaaggtccgaaacgtcccgtcgaacccaaacaccatctttcggaggcgcgcggtcaccgcgacctggctgttgaggacgtacgtgatgtcgttccgggccacgactagctgttgcttgctgtgcacctcacagcgcacgtgccccgcgtcctggtcctgactctgggagtagttggtgatgcgactggcgttggccgtgatccacttttccatggtcagcgtgggttgctgcgtgagccgtcgatactcgtcaaactctttgaccgacacaaacgtgagcacggggagggtaaacacaacaaactccccctcgcgagtcacctttaggtaggcgtggagcttggccatgtacgcgctgacctccttgtgggacgagaacagccgcgtccaccccggaaggttggccgggttggtgatgtaactttccgggacgacaaagcggtccacaaactgcatgtgctcctcggtgatgggaaggccgtactccagcaccttcatgaggttcccgaactcgtgctccacacatcgcttgttgttaatgaaaatggcccagctgtgcgagaggcgcgtgtactcgcgtagggtgcggttgcagatgaggtacgtgagcacgttttcgctctgccggacggagcatcgcagtttttggtgttcgaaggtggactccagcgaggccgtctgggtcggcgaccccacgcacaccagcaccggccgcaggcggcccgcgtactggggggtgtggtacagggcgttaatcatccaccagcaatacaccacggtcgtgagtaggtgccgccccaggagcccggcctcgtcgatgacgataatgttgctgcgggtgaaagccggcagcgccccgtgtgtgaccgaggccaggcgcgtgagggcaccctggcccagccccaaagtctgctctagggcggtgagggcgtggaactcgtttcgcgcgtcttcgcccccgtgcgccgccagggcccgcttggtgatgtcgaggatcacctcccagtagtacgtcaggtctcgccgctgcaggtcttccagcgaggcggggctgctggccagggtgtacgggtgctgccccagctgggcctggacgtgattcccgcgaaacccgaactcgtgaaagatggtgttgatgggtcgactcagaaacgcccccgagagcttaacgtacatgttctgcgccgcgattcgcgtggcgcccgtgaccacgcagtccaggacctcgttgagggtctgcacgcacgtactctttccggatccggcgttgccggtgatgagatacgccgcgaacggaaactcccggagcggcaggccggtcgggacctccaaggccgccacgtcccggaaccactgcaggcgcggcacctgcgtgacgtcgagctgctgctgcgagagctctcggatgcgtgcgatgattggttggaccccgtgcatggacgtaaaatttaaaaacgcctcgtccctgaaccgcacggcgggtctggccccgggctgctgtgggggcggacctggtgcccggacgtcccgcgagccctccccgccggacgccgccatggccgcacagcgcgcgcgggcgccggcgatgcggacgcggggcggcgacgcggcgctatgcgcccccgaggacggctgggtgaaggttcaccccacccccgggacgatgttgttccgcgagattctcctcgggcagatggggtacaccgagggtcagggggtgtacaacgtcgtccggtccagcgaggccgccacccgacagctgcaggcggcgatcttccacgcgctcctcaacgccacgacgtaccgggacctggaggaggactggcgccgccacgtggtggcccgcggcctccagccgcagcggctggttcgcaggtaccggaacgcccgggagggcgatatcgccggggtggccgagcgggtgttcgacacgtggcgatgcacgctcaggacgacgctgctggactttgcccacggggtggtagactgctttgcgccgggcggcccaagcggaccgaccagcttccccaaatatatcgactggctgacgtgtctggggctggttcccatattgcgcaagacgcgcgagggggaggcgacgcagcgcctgggggcgtttctcaggcagcacacgctgccccggcagctggccacggtcgccggggccgcggagcgcgccggcccggggcttctggatctggccgtcgcgttcgactccacgcgcatggcggaatacgaccgcgtgcacatctactacaaccatcgccggggggagtggctggtgcgcgacccggtcagcgggcagcgcggcgagtgcctggtgctgtgcccccccctgtggaccggcgaccgcctggtcttcgattcgcccgttcagcggctgtgccccgagatcgtcgcgtgccacgccctccgggaacacgcgcacatctgccgtctgcgcaacaccgcgtccgtcaaggtgctgttggggcgcaagagcgacagcgagcgcggggtggctggcgccgcgcgggtcgtcaataaggcgctgggggaggatgacgagacgaaggccggctcggccgcctcgcgtctcgtgcggctcatcatcaacatgaagggcatgcgccacgtgggcgacatcaacgacacggtacgcgcctacttggacgaggcgggggggcacctgatcgacacccccgccgtcgaccacaccctccctgggttcggcaagggcggcaccggccgcgggtcgcgcccccaggacccgggggcgcgaccgcagcagcttcgccaggcgtttcagacggccgtggtcaacaacatcaacggcatgctggagggctatatcaataatctctttggaaccatagaacgcctgcgagagacgaacgcgggtctggcgacccagctgcaggcgcgcgaccgcgagctgcggcgcgcccaggcgggggcgctggagcgggagcagcgcgcggcggaccgggcggccgggggaggcgcgggccgcccggcggaggcggatcttctccgggccgactacgacattatcgacgtcagcaagtccatggacgacgacacgtacgtggccaacagtttccagcaccagtacatccccgcgtacggccaggacctcgagcgcctgtcgcgcctctgggagcacgagctggtgcgctgcttcaagattctgcgccaccgcaacaagcagggccaggaaacgtcgatctcgtactctagcggggcgatcgcctccttcgtggccccgtatttcgagtacgtgcttcgcgccccccgagcgggcgcgctcatcaccggctccgatgtcatcctaggggaggaggagttatgggaggcggtctttaagaaaacccgcctgcagacgtacctgacagacgtcgcggccctgttcgtggcggacgtacagcacgcggctctgccccggcccccctccccaacccccgccgatttccgggcgagcgcgtccccgcggggcgggtcccggtcccggacccggacccgatcccggtcgcccgggagaacgccgaggggtgcgccggaccagggctggggcgtcgaacgcagggatggccgaccccacgcccgccgatgagggaacggccgccgccatcctcaaacaggccatcgccggggaccgcagtctggtcgaggtggcggaggggatcagcaaccaggcgctgctgcgcatggcctgcgaggtgcgccaggtcagcgatcgccagccgcggtttaccgcgaccagcgtcctgcgcgttgacgtcacccccagggggcggttgcggttcgttctggacgggagttccgacgacgcgtacgtggcgtcggaggattactttaagcgctgcggggaccagccgacgtatcgcggttttgcggtcgtcgtcctcacggccaacgaggaccacgtgcacagcctggccgtgccccccctcgttctgctgcaccggctctccttgtttcgccccacggacctccgggacttcgagctcgtctgcctgctgatgtacctggagaactgtccccggagccacgccacgccctcgctgttcgtcaaggtgtcggcgtggttgggggtcgtggcccgccacgcgtctcccttcgagcgcgtccgctgccttctcctccgcagctgccactggatcctgaacacgctaatgtgcatggcgggcgtgaagcccttcgacgacgagctagtcctgccccactggtacatggcccactacctgctggccaacaatccgccccccgtcctctcggccctgttttgcgccaccccgcagagctctgcgttgcagttgcccgggcccgtcccccgcacggactgtgtggcctataacccggccggcgtcatgggaagctgctggaattccaaggacctgcgttcggctctggtgtattggtggctttcggggagccccaaacgacggacctcgtcgcttttctatcggttttgctaactccggaaaataaacgtgttttttatggaacgttccccacctgtcgtgtcatctctcgggggatggtggtgggcctgtgtgtgtgtcttgtgcaccgaaggaggaaagtgggggggtggtggtgctggtggtggaaagacatgatagagggaacaaagaaatagaagaaaaccacaaccggcgcgtgccagtaaatacggacgcgcgcacacgcggggggtaagttggagcacggggccccggtttattgaccaaattcagggaaacagaaaccgaatcttttcatcgaaagggtacacaaagctcccgccctcgccccacacgccttccagaacccccgtaaacaccagttgaatctcgcgcaggatctcgcgcaggtgatgggcgcagtccacgggggggagcaccaagggccgcgggtacagatccacggggacgccgaccgactccccgcccccgggacatacgcgcacgacgcgtctccagtattgctccgcgtccagcagggcgcctccgcggaaggccgtttggggcagggggtcgtcggcctcgcctgggggggtcagaacgctccagtactccgcgtccagacgcctcccgaaggcatccaggacaaagcggtcacaggcgtcctccatgacgccccgggccgcgcacacggcctcctccggcgggccggcggccggccgccggaggattcgtctcagcgcgtcgcgcataacctcggccgccgcggcgtacgcggccccgcggagaggaaatccctgcaggaagtcggtgtcatcgcgggagttccagaaccacgccccggtctggctccaggtgacgacgtgggtgtagacgccctctggcgccagggagggggcgaggcgcgggcgtatgccgttggccgaaagtacggcgcgcacggacgcctcgagggcccggcgggcgtcctggatcgcgccgtgcgcggcgtccgcgtccccggggtccacgttgaacagcccccagaacgcagccccggtgccgccgcagaccgcaaacttcaccgagctggccgtctgctcgatctgcaggcagacggcggccatgaccccgccgagcagctgccggagcgcggggcaggcgtcgcacgcgtccggcaccaggcgctccagcacggcccgggcccagggctccgagggggcggccgccaccagcgcgtccagcctttccaggcccgcccgcccccgggcttccggcagcccggcctccccgaggcccgcgagggcggccaggagctgggcctggagcccggagaaacaaaaccgcgccgtccagaccggcccgacggccgccggggggtcgagtagttggatggtggtggccgtggggtgccaccgcgcgaccgcttcccgaaaggcgggcaggaggcggccggccgcctccgaggccacggccggccatgcccgcgggggcaggacgaccctggcgcccaccgcgggccaggcccccaggcacgcggcatgggtggccgcggcgccccgcaccaggtcacgcgccgactcggcggcggcggcggccggcacggtaaacgtgggccagcccggaaatcccagcacggcaaagtattggacgggccctccccggacctcaaacccgggccccagaaaagcgaagacgggggccagggctccgggggcggcgtggaccgtggtatgccactgccggaagagggcgaccagcgccggggcggagaacccgtcgccggcgctcacgaagtagtcgtagccgcgcggcagcagcacccgcgccgtgacccgctgcgggtgtccgcggggccgcaggccgacctcgcacacctcgaccaggtccgcgaaggcgccctccttcctggtcggcggaaacgccagggtggtgtattcgcgcgcaaaacgcgcggtcctcgtcgtgatggtgacggcgagcgaggcggaggacgcgcactgggggctgtcgcgaatggcggccaggcgcgcccacgccaaccgcgcgccggggtgctcggcgacgcgcgcggacagggccagcgggtcgacgtcgaccttggcctccacgtccaggagggcggcgcgaggagcggccggcgggccccacgacgccctttcgaccctcacgaccagacccgtctgcgggtcccagcccaggcgcagcgggacgaagagggcccaccggcccgtctggcgctccagggccgccagaacgcacgcatacagcgcccgccacagggtcgggtcccccaggggctccagcggggaggcggccggggccgtcgcggcgcgggcggccgcgacggccccgggggccgagacgtcgggggagccgtagaagtcctgcaggtcggacgaaccaacggacacctccgcgaagcgcgcgcgcgcctcccccgcggcgtcgcgacagaccagatacagcagggcgtggaggcagtcgcgcgtgcgcgggggcagccataccgcgtatagggtaatggcgctgacgctctcctccacccaaacgatgccgggggcttccatgccacgacgcccgggggttgccgtgtatcgaacgagcgcggccccagacttatagggtgctaaagttcaccgccccctgcatcatgggccaggcctcggtgggaagctccgacagagccgcctcgagaatgatgtcagtgttgggctgggcgccggaggcgtgcgtgcgcaagcagcgcccccacgcgggcgcgcgcagcttgaagcgcgcgcccgcaaactcccgcttatgggccatcagcagcgcgtacagctgtctgtgcgtccggcaggcgctgtggtcgatgcggtgggcgtccagcagctccacgatggctcgcttggtgaggtttttaacgcgccccgccccgggaaacgtctgcgtgctcttggccagctgcaccccgaacagttcgccccagatgatcttgaacagcgacagcgcgtgctccgtctcgctcacggacccgcgcggggggcagccgctcagggcgtcggccacgcgcttaaccgcgtcctccgacagcaaggggccgtcggtcacgttacagtggcccagttcgaacaccagctgcatgtagcggtcgtagtgggggttcagcagctccagcacgtcctcggggctaaaggttcgccccgaccccccggccatcgagtcccactgcaggcacgcggccatggtgctgcacagacggaacagctcccagacgggggcgacgtttagggtggggtgtagggccacaagctccagctctccggcggcgttgatcgtggggatgacgcccgtggcgtagtggtcgtaaagccgccggaagatggcgctgctatgggcggccatggggacgcgaagacaggcctccagcagcaccaggtagatgaaccgcgtgcggccgaccaggctgttgaggccgcgcatgagcgcgaccacctcggccggcgcgacgtccggccggaggtacttttcgacgaaaaggcccacctcctccgtctcggcggcctgggccgacagggacgtgtcggggtcctggcagcgcagctcccgcagatcccgctgggccctcagggcatcaaaatgtatcccccgcaaaaacagacaaaagttcctcggggtcagcgcggcgtcgtggccccagaaccgcacgtgcatgcagttgagggtcagaagcatgtggaggatgttaagactgtccgcgaggcacgccagcgtgcacctctcgaagtagtgcttgtaccggaatttgctgtagatgcgcgacccccgcgcctgcgccgcgtcggcgtgcgacgcgtcgcagcgccctttgaaccggcggcacaacaggttcgtcacctgggaaaactgtgccggccactgcccgctggcgctcaccacgtggttgagcagcatgggcgtaaagacgggctccgagcgcgccccggacccgtccatgtagatcagcagctcccccttgcggagagtccgtacccgccccagcgactggtacacggacaccatgtccggcccgtagttcatgggtttcacgtaggcgaacatgctgtcaaagtgcggcggatcgaagctaaggcccaccgtcacgaccgttgtgtagatgaccacccggtaccggccccatgtggtcacgtcgccgggcggggtgagcgagtggagcagcagcacgcggtccgtaaactgccggcagaacctggcaacgacctccgcgaaggagaccgtcgacgagaagatgcagacgttatctccgccggccaggcgcgcctccagctccccgaagaaggtggcgtccgggggggcgtccggggggggcgccccgcccgccggcccccggcggcgcagggccgcctgcaggacctcgggccccaggcgcgggagaaacagacaacggcgcgccgaaaatccgggcatggcgtactccccgatgaccacgtgaacgttcttttcgccccggaggctgcacagaaagtccaccagctgcgcgttggcggtggcgtccatggcgatgatccgcgggcacgtgcgcagcaggcgcagcatcaacgcgtcgacgcggcccagctgctgcatcgtcggcgagtacagttggcccaacgtcgacatgacttcgtccaggacgagcacgtcgtagttgttcaacaggttcgggcccacgcgatgaagactttccacctgcacgatgagacggtggaaggggcggtcgttcatgatgtaattggtggatgagaagtaggtgacgaagtcgggcaaccctgactcagcgaaccgcgtcgccagggtctgagtaaaactccgacgacaggagacgaccagcacactcgtgtccggagagtggatcgcttcccccaaccagcggatcagcgcggtagtttttcccgagcccattggcgcgcggaccacagttacgcaccgggccgtcggggcgctcgcgtccgggaaggtgacgggtccgtgttgctgccgctcgatcgttgttttcgggtggacccggggaacccactcggccaaatcccccccgtaaagcatccgcgccagcgatacactcgacgtgtactgctcgcactcgtcatccccgatgggacgccgggcccccaggggatcccccgaggccgcgccgggcgccgacgtcgcgcccggggcgcgggcggcgtggtgggtctggtgtgtgcaggtggcgacgttcatcgtctcggccatctgcgtcgtggggctcctggtgctggcctctgtgttccgggacaggtttccctgcctttacgcccccgcgacctcttatgcgaaggcgaacgccacggtcgaggtgcgcgggggtgtagccgtccccctccggttggacacgcagagcctgctggccacgtacgcaattacgtctacgctgttgctggcggcggccgtgtacgccgcggtgggcgcggtgacctcgcgctacgagcgcgcgctggatgcggcccgtcgcctggcggcggcccgtatggcgatgccacacgccacgctaatcgccggaaacgtctgcgcgtggctgttgcagatcacagtcctgctgctggcccaccgcatcagccagctggcccaccttatctacgtcctgcactttgcgtgcctcgtgtatctcgcggcccatttttgcaccaggggggtcctgagcgggacgtacctgcgtcaggttcacggcctgattgacccggcgccgacgcaccatcgtatcgtcggtccggtgcgggcagtaatgacaaacgccttattactgggcaccctcctgtgcacggccgccgccgcggtctcgttgaacacgatcgccgccctgaacttcaacttttccgccccgagcatgctcatctgcctgacgacgctgttcgccctgcttgtcgtgtcgctgttgttggtggtcgagggggtgctgtgtcactacgtgcgcgtgttggtgggcccccacctcggggccatcgccgccaccggcatcgtcggcctggcctgcgagcactaccacaccggtggttactacgtggtggagcagcagtggccgggggcccagacgggagtccgcgtcgccctggcgctcgtcgccgcctttgccctcgccatggccgtgcttcggtgcacgcgcgcctacctgtatcaccggcgacaccacactaaatttttcgtgcgcatgcgcgacacccggcaccgcgcccattcggcgcttcgacgcgtacgcagctccatgcgcggttctaggcgtggcgggccgcccggagacccgggctacgcggaaaccccctacgcgagcgtgtcccaccacgccgagatcgaccggtatggggattccgacggggacccgatctacgacgaagtggcccccgaccacgaggccgagctctacgcccgagtgcaacgccccgggcctgtgcccgacgccgagcccatttacgacaccgtggaggggtatgcgccaaggtccgcgggggagccggtgtacagcaccgttcggcgatggtagccgtttcgttcgttttaataaaccgacgttgtgcgtttcaccatacttcggcgcgcgtgtgtgtgtgtttttttttttgtggtgtttattttccccccaccccttccttttctttcggccaccacccccctcctcccccgtactatacaacaaaaaataccacacatacgaccaaatacggacaatcatttctgtctttattcgctatcagagagtgggggcgtgagcgtggcaggagggcgggccacgtcggggtcccgccgtctggtgtgacgcgatggggggtccgatgcgcgccggtactggggccccggcgcccgggtgaccacgcgcacgtcggggggcacgtagaagttaccctcttcttcggactcgatgtccacgacgtcaaattcgtgggcggtcagcgagacgacctccccgccgtcggtggtgatgacgttgtgtcggcagcagcagggccgcgccccggagaacgcgaggcccataacttggcgagcgtatcgtcgaaggccaggcggctgtttcgccggatgtcccggtagatccccggctcgacgcggacgggggtgatgatcagggcgatcggaacggcctggtccgggaggatcgatgccttggcgggtccgggggccccgccaggcccggcgggcgctccgcggccgtcctccaggcggaacgtcacgccctcctccgcgcccgcgcggtgcctgccgaggaacgtcaccaggtgcggttgcagggggcagtcgggaaagtggctgtcgaggacgtatccctgcaccaagatctgtttgaagttcgggtggcgggggttggcgaagatgggctcgcggcgaaccagctccccggagctccaggccacgggagagatggtgcgacgctcaaggtcggggacgccaaacagaagcacctccgagacaacgccgctatttaactccaccagcgcccgatccggggcggagcatcgccttttttcgccggcggcgcgggaatcgagccagtcccggtcttgggtgacgagcgcctcctccgggcccggaacgcgcccgggcgcgaagtagcgcacgccggggttggggatggaccggatgaacgcccggaacgcctccggcgatcgccgcgccatcaggtcctcgtacgcggaggccgcgggggcgccggggtccgcggggtcgaacgcgtacttggctcggcacttaacctcgtagaaggccaggggggtctggggggcgggggccaggtagccgtgagggtccctggggcacacgaggatgtccagggacgcccccaccatgcccgtgtggccgtccatgaggaccccgcacgcgtgcacgttctcctcggcgaggtccccgggttggtgaaagacgaagcgcccggcgtcggcgtcgtcgttgacgcccgcgtccgcgcggcccacgcagtagcgaaacagcaggtttcgggccgtcggctcgttcacccgcccgaacatcaccgccgacgactgggcgtccagccgcaggctggcgttgtgggtgagccactgggacgagaagcacggaccctgcgcgccccaccgcagcgtggaggcggtcgtcaggccccgccgaagcagggcccagagctggcagtcggcctggttttgcgtcgccgcctcgtaaaatcccataagcgggcggggggcgacggcttcggcggcggacgggggggcgcggcgcgtcaggcgccagaggtgccggccgagcccgcggtccaccatgccggccgcctccagcgacacgacgagggagcacagatagtccaggcgagcccacaggggcccgatggccagaggggagcggacgccgcgcagcaggccgcgcaggtggcgctcgaacgtttccgccaagatatgggggggcagtgcgttggggatcgccgacgccgaccacatcgggtcggggtccgggggaccggggctgcagtccgggtcgatggcgtgtgcgccccccggcgagaggggaatgtcgggggttggcgggccggatgaggcctcagagagggccggggacgcgggccgggccttttcgcccggggccccgccgtcgggttgcccacgtggggggctctggggccaatgggaacccggggcccccggtgacgtggggcggggtggggcggggcggggcccaaagacggtcgccagatctaggctgttgggtcggggccgcttcgggggactatcggggtcgcgggcggggtccgcggggcgcttggcgccgggtgttgcggcggccgccatttttacgagcagccgaagagctcgagggcggaagggatcctcacgacagagagtggcgcgcggccgggttggcgtgacagaggcgggagaccagcaccagcagcggcctcagctcgggcggcagcgacaccgacgacaggacggccttgtgcgtgcgctggtaatttatacactgctccgtgaacgcgcgccgaatcttgggattgcgaaggtggcgccggatgccctccggcacgtcatacgccaggccgtgggtgttggtctcggccgagttgacaaagagggcggggtgcagaacgcagcgataggcgaggagggccacggcaaagtccggcgagagctggttgttaaagtactggtagcccgggacgcgggtcacggggacgcccaggctcggggccacgtacacgctaaccagcagctccagcagcgtctgccccagggcgtagagatcgaccgccagcccgacgtcgtgcttcagggggcggttgttaaactcggcccgctcgttgttgaggtactttaccgagagctccggtggctggttgtacccgtgccccaccagagtgtgaaagttggccgtggtcagggcggcgggcatcccaaacccccggggggactcgaggtccggctcctggaggcaaaactggccccgggatatcgtggagttggagttcagggtcaccaggctaaagtcggccaggacggccggccggagcgacaccgcgtccgatcgcagcatcacgaggacgttggcgcacttgatgtccaggtggctgatcccgcacctggtgttcaggaacaccacggcgcgcgccaggtctgtgaagcagtggtggagggccgtcgcgacggagggggtggtcgcgcgcagggacgccagctggccgatgtacttgccgaggtccatgtcgtacgcggggaacacgatctggcgctgctgcagcgagaacccgagcggggtgataaagccgcggatgtcgtgggtgcggccgccgcgaagagcgcactcccccacgagcagggtcgcgacgagctccacggcaaaccactctttttcccggatggtcttcacggcgagcttgtgttcgcgaatcaactgcacctcgccgtacccccccgagcccccgaagctgcgggccccggggatctccagggtcgtgtagcggagggcggggttgacggcgaatacggggatgcatagcttgtggatgcgcgcgagggacaggatgtgcgaggggggcgacgggggcgaggtcatggccgtctcggacctgcgcaggggcgggcgccttagcttggccgcagggccgggggcctcgggggacgagcggcgacgagacgagcggctcactcgccatcgggacagtcccgcgcgaagccgctcccggaagctggatcggcggcgggacccggggcgggctccggagacggcgccgtctcggggggaggggccgcttgggcgtccggacgcccggcggctgagggagtgtatgtaggacgcgagccaggccttgaaggagcgtcggtgtgcaccttgggggctgatgtcagctgccacatgactagcaggtcgctgtcgcccggactcatccatccgtccgccaggtcgccgtccccccacagagacgcgttcgccgcggcctcttcgagctgctcctcctggtccgcaagacgatcgtccgccgcgtccaggcgctcgctaagcgcgggatcgaggtaccgtcggtgtgcggttagaaaatcacgtcgcgccgcttgctcttccacgcgaattttaacacaggtcgctcgctgtcgcatcatctctaagcgcgcgcgggactttagccgcgcctccaattccaagtgggccgccttggcggccataaaggcgccaacaaacctaggatcttgtgtactcacgccctcccggtgtagctgcagggtctggtccctgtacacctcggcccggaggtgcgtctcggccaaacgtcggcgcagggccgcgtggctggcgtctcggctcatctcgccgcccccgcgcgcgcccgacgtcggactccttcgccccgacccccctgacctcagccgcccccgcctcgcccgcgatgtttggccagcagctggcgtccgacgtgcagcagtacctggagcgcctggagaaacagaggcaacagaaggtgggcgtcgacgaggcgtcggcgggcctgacgctcggcggcgatgcgctgcgcgtcccttttttggattttgccaccgcgacgcccaagcgccaccagaccgtggtcccgggcgtcgggacgctccacgactgctgcgagcactcgccgctcttctcggccgtcgcgcggcggttgctgtttaatagcctggtgccggcgcaactcagggggcgtgactttgggggcgaccacacggccaagctggagttcctggcccccgagctggtgcgggcggtggcgcgcctgcggtttcgggagtgcgcgccggaggacgccgtgccccaacgcaacgcctactacagcgtcctgaacacgtttcaggccctgcaccgctccgaagcctttcggcagttggttcacttcgtgcgggacttcgcccagttgttgaaaacctcgttccgggcctctagtctcgcggagactacgggccccccgaagaaacgggccaaggtggacgtggccacccacgggcagacgtacggcaccttggagctcttccagaaaatgatactaatgcacgcgacctactttctggccgccgtgctgctcggggaccacgcggagcaggtcaacacgttcctgcggctcgtgttcgagatccccctgtttagcgacacggccgtgcggcacttccgccagcgcgccaccgtgtttctagtccccaggcgccacggaaagacctggtttttggtgcccctcatcgcgctgtcgctcgcgtccttccgggggatcaagataggctacacggcccacatccgcaaggcgaccgagcccgtgtttgatgagatcgacgcctgcctgcggggctggtttggctcgtcccgggtggaccacgtcaagggggaaaccatctcgttctcgttcccggacggctcgcgcagcacgatcgtgtttgcctccagccacaacacgaacgtaagtacgccttcctcccgcggtgcctgtttccccggtgccgccctccccgagatcgaccgacagacaaacacagccagacgcgagtgtgggacgacacgcccgcagccccccccccgccatggcgggggggaagccttactgtttatttgtaatcggacgatgaggctctggccacggcccgcgcgaccgcggggcagctcgttgcaaacaggcggctggtatacgatgacagaacgcagaggcgccacccggcgctggtcgggcggatgacgctttccgcgccgtcccggcccacgacgacctcgtgcaggtgggccgtgatgcgcgggcggcgggtcgcctgccgcaggataaccgcgtccacggggtgcccgaagaggagctgacacaggctcgcgtccccccggacggccagggtgcgctgggccatattggaccacatgcacggggcgacgcagggacaggcctccgccacggcgggggcgcgccacagcgcgttggcggaatcgatgtgggccgtcggggcgcaggcgccgcctcctcccggggggtcggtaatcctggatagcagccatcctaaatggcgggcccggctgcccgggggacagagcgaccccaggtcatcatccatggcccagcagtatatgcggccgccggggaggtgccaccaggcccccggacccagggcacagcacgccccggattcgggggccgtgtccgtgggtaccaggtaggcgccgtcgagctcgtgggccacgggctcgtccgcgagctgttcggcggcggggtcgggggtttcctccgggggggaggcagcttccaggtggccgaaggctagggtgcacagcagcggggtccgggggtgcgttacgctgcggaggtggacggtggcgcagtagcggcgctcgcggttaaagaagaaaatggcaaagaacgtgttcgaaggcaggcgcagcgccttgggccgcgtcaggtacaggaagatctcgcagaaaagggcacgctcggggtcggggtccggaagggccacctggcacagcggctcggtgaggaccgtgaggcaccgaaaaatcttaagccgctcgtccccccgaacgacgcgccacacgaagacagagttggcgatgcgcgcgacgaggtcggcttcgggccccgggtcgggggcgcgcgcgtcggggggggcgccccggtgacccggcggggccgcggctcccggggggcctggcgtcgcctggggacgccagagtgcccgctgtgccaggttggtggtggggaagggaccggagacgcaccaaaagcagaggggccagcgcgtgtatgagttggggggggggtgggtgagcggtggaacaaaagcacgcgtcagcggacaaggccgggtcccgtagccgccccgcgacagaaccggagtccgacggcacgcgcgacggggtctgcgaggctgaggtacgccgcggtgttaatggtaaacgcaaagcctcccggaaagaccactagcccgcagaggcggcgattgaacccaaggcagaggtacgcgtagctctctcccggaaggtattgctcgcagaccctgtgtggggcagtggaggggctgccctccatgaagcgacatttactctgctcgcgtccattgacgtcaccgtcaatcaccactgcgattggacggttggtgaggcgcagcgtgtctccgctggtgctgtagtagtcaaacgcgtagtgggcgtcggagtcggcgaagcgggcggggatgtcgtcgctgagagggacgagccgccgccgccgcccccgaccgccctggccgcccagatgcgccagcacggccagggcgtacgcggtgtgaaagaacgcgtcgggggcggtcccctcgagggcgcgcatcaggttctccaggagcacggggaagcgccgcgtcacctcccctagccactcgctctggtgggggccaaagtcgtagcgcaggcgctggaagatgcgcgggccgccttggagcgcggcccggatagagtggcccagggcccgcagacacgcgatctggatgcgcgcgacgaaggccacctcggccgcgatgtcaaagggctgcagcacggggcgcgggtggcgcaggggtccctcgagcgcgggaaagcgacgcagcagcgccgtctgggccgcgggggacagctggtgggggcgcacgacgcgctcggcggcacaggcctccgtcagggccgtggccagctcggaggacagccgcggggggcgggcgcgtcgcccgccccacgccaccgaattctcgtaggagacgacgacgaagcgctgcttggtcccgtagtgatggcgcaggaccacggagatggagcgacggctccacagccagtcgggccggtcgccgccggccagagcttcccacccgcggtccagccactcgaccagcgatcgcggcttggcggtccccggcacgagggtgagcacgtcgttgaggacgtcctcgcccgcggcccgggggcccccccggctggcaaagcgccccccgccgggcggctccaggcccgccagcaccgcctccgcgtccgacgcgcccagggctcccccgctgacggcctggtggaccagggcgccctggcggagccccgaggcgacgccggaggccgcgtgcttggggcgcgcgcggaccgggtggcggcgggtgacgtcctgcacggcccgctggaccagcgcgaggatctcctcgttctcttgcgtgatggacacgtcctccgcggtggccgtgtcgcctcccggggccgtgagctgctcctccggggagatgggggggtctggggtgccgacaacggccggcccggccccgcccgagaccgaggacgcctggggagtgggggtgccgctttcccccatccccagggacaggtgggccgccgcctccgtcgcggcggcgggagccgcggcccccagccgcgcgacgtagcgacaaaagtggcgacagaggcgcatgaggcgcgcgccgtcggccgcgtatcgcgtgtttggcgggacgagctcgtcgtaactgaacaggagcacgcgggcacaggtcgcccacgggccccacgccaggcgcagcgccgcgaccgtgtacgggtcgtacacgccttgggcgtcgcacgcgaccggcagggagacgaacagcccgcccgcgctggggacgcgcggcaggaggtccgggtgcgccgggatgacgggggctaggatcgcccccaccgcatccgccggcacgtaggcggcaaacgccgaacgccacggggtgcagtcgccggtcgcgtgggcccgggtctgggtttcgacccggaagttcgcggccgccccaccgtcggggcggccgcgcacgagggcggacagcgggacccccgccgccgccaggcactcgctggagatgatgacgtgaatcagcgaggcggggctgctcgggtcccgggtgagatcgtattggacctcgttggcaaagtgcgcgttcatggcccggccggcggtgcgagcccttcccggtgccggaaggggcgtgggtggggggtgcgtgtgcgcgtcctcggggcccgcgggcgcacgtgcgcttatacgctgtgtgtttcgtctgtccccagggaatccggggccaggactttaacctgcttttcgtcgacgaggccaactttattcgcccggatgcggtccagacgattatgggctttctcaatcaggccaactgcaagatcatcttcgtctcgtcgaccaacaccgggaaggccagcacgagctttttgtacaacctccgcggggccgccgacgagctgctcaacgtggtcacctatatatgcgacgaccacatgccgcgggtggtgacgcacaccaacgccacggcctgttcctgctatatcctgaacaaacccgtgtttatcacgatggacggcgccgttcgccggacggccgatctgtttctgcccgactccttcatgcaggagatcatcggggggcaggcccgcgagaccggcgacgaccggcccgtcctaacaaagtcggcgggggagcggtttctgctgtaccgcccctccaccaccaccaacagcggcctgatggcccccgagctgtacgtgtacgtggacccggcgttcacggccaacacgcgcgcctccggcaccggcatcgcggtcgtcgggaggtaccgcgacgatttcattatcttcgccctggagcactttttcctccgcgcgctcacgggatcggcccccgcggacatcgcccgctgcgtcgtgcacagcctcgcccaggtgctggcgctgcaccccggggcgtttcgcagcgttcgcgtggcggtcgagggcaacagcagccaggactcggccgtggccatcgccacacacgtgcataccgagatgcaccgcatcctggcctcggcgggggccaacggcccggggcccgagctcctcttctatcactgcgagccgcccggcggcgcggtattgtaccccttctttctgctcaacaaacagaagacgcccgccttcgaatactttatcaaaaagttcaactccgggggcgtcatggcgtcccaggagctcgtctccgtgacggtgcgcctgcagaccgacccggtcgagtatctgtccgagcagctcaacaacctcatcgaaaccgtctctcccaacaccgacgtccgcatgtactccggaaaacgcaacggtgccgcggacgacctcatggtcgcggtcatcatggccatttacctggcggccccgaccgggatccccccggccttttttccgatcacgcgcacgtcttgagtctttcttgccgtttcttttgtttctctttctttccccccctctctccgcaataaacgccttcccggaactgtgtttccccccctacaacagtgttgtccgttggttgggtggttggggtgcgggggtgggcgggggaagcaagaaaacggtcggcgaacacaacatcgggaaaacggattcccgcacgtgcgtcttcccagattcgacacacacaccccccttctccttaaataaacacaaaccacacgctcgttggttggttaatgccagcgctttatttacgtcttgttttttttgcgtttcctccgcgggtcccttcccaacacgcctgcccccgcctcaggggtagcggataaccggggccatgtcgccggattgcacaacggcggcgccgtcgaacgtacacacccgaaccgccggggccagggccaggatgtccccgagttggcccgcgtgcgccagccaggcgaccagcgcctcgtaaagcggcagcctgcgttcgccgtcctgcatcagcatgggggcttcggggtggatgagctgggcggcttctcgcgtgacgctctgcatctgcaggagcgcgttcacgtatccgtcctgggcgctcagcgcgagcagccgggggatgagcgtgaggatgagggtggttccttcggttatggagtagaccatgttgaggacgagcgaccgcagctcggtgtttacggaggcgagttgctggacgtcggccacgagcgagagacgggccccgttgtaatacagcacgttgaggtcggggagctccccgggcgtccgggggtcggggttgaggtcccggatgccccgggcgaccagccgcgcgactatctcgcgggccaggggcgttgggagcgggaccggaaaccgcagcgtgaggtccagcgactccaggcgcacgtccgtcgcctggccctcgaagacgggcgggacgaggctgacgggatccccgttgcagaggtcgacgggggaggtgttgcggagattgacggtgccggcgtgcgtgagccccaggtccacggggcaggcgacgattcgcgtgggcagcacccgcgtgattaccgcggggaagcgcctgcggtacgccagcaacaaccccaacgtgtcgggactaactcctccggagacgaacgattcgtgcgccacgtccgcgagcgccagctggcggcggatggtcggcagaaagaccactcgaccctcgcaccgctgcagcgccgcggcatcggggcgcgagatacccgaggggatcgcgatgtctgcttcgaaacaatccgtgatcatggcgccgggccgcgagacaccggaacgcgggggtgcgggagggccggaaagcgcaacgcaaccgggacgatgatgaaacagagatggggggcaccgaccgtgtgggagagggggcggggcagggctcagcagcacgcacggggaggtctgtcgtgcgcaggagccccaggtgagaatcagtcccccggagctcgggtctgggttttattgggacctgccctcggaatcgcggctcccagtccaagcccccctggggggggcggggacagggggtgtgtgtgggtaaaagcaacgtcggaaaatcaaacccaatgccccaaacaggaaaaaaaaagacgggcgggtggagggaaagctggggaagaagaagccaattttacagagacaggccctttagcggggaggcgtcgtagatgagatactgcgtaaagtgggtctctcgcgcgtgggcctccccatcgcgggcgctgcgtagcagggcggggtcgctggcgcaggtgatcgggtaggcttcctgaaacaggccgcacgggtcttccacgagctcgcggcaccccggcgggcgcttaaactgcacgtcgctggcagcggtggccgtggataccgccgatcccgtttccacgatgagacgctccaggcagcgatgtttggccgtgatgtcggccgcggtgaagaacttgaagcaggggctgaggacgggcgaggccccgttgaggtgataggccccgttgtacagcaggtccccgtacgagaaccgctgcgacgcccacgggttggccgtggccgcgaagggccgcgccgggtcgctctggccgtggtcgtacatgagggctatgacgtccccctccttgtcccccgcgtacacgccgccggccgcgcgtccccgcgggttgcagggccggcgaaagtagttgatgtccgtggccacgggggtggcgatgaactcacacacggcatcctgcccgtggtccatgccggcgcgccgcggcacctgggcgcagccaaagaccgggaggggctgggccggccccagccggtttcccgccacgaccgcgttgcgcaggtacacggcggccgcgttgtctagcagcgggggggccccgcggccgaggtaaaagttttgggggaggttgcccatgtccgtaacggggttgcggacggtgcccgtggccgcgacggcggtgtagcccacacccaggtccacgtttccgcgcggctgggtgagcgtgaagttgacccccccgcccgtttcgtggcgggccacctggagctggcccagaaagtacgcctccgacgcgcgctcggaaaacagcacgttctcggtcacgaagcggtcctgccgcacgacggtgaacccgaacccggggtggaggcccgtcttgagctggtgatacagggccacggggctcatcttgaagtaccccgccatgagcgcgtaggtcagcgcgttctcccccgccgcgctctcgcgggcgtgctgcaccacgggctggcggatggaggagaagtagttggcccccagggccggggggaccagggggacgtcgcgcgccaggtcgcgcagggccggggggaagttgggcgcgttggccacgtggtcggcgcccgcaaacagcgcgtggacgggcaggacgtagaagtattcgccattttggatggtgtggtccaggtgctggggggccatgagcagcacgccggcgtgcagcgccccgtcgaagatgcgcatgttggccgtcgacgcggtgttggcgcccgcgtcgggcgccgcggagcacagcagcgccgtcgtgcgctcggccatgttgtgcgccagcacctgcagcgtgagcatggcgggcccgtcgacgacgacgcgcccgttgtggaacatgcgcttgaccgtgttggccaccagattggcgggatgcagcgggtgggcggggtcggtcacgggatcgctcgggcactcctcaccgggggcgatctccgggaccaccatgttctgcagcgtggcgtacacgcggtcgaagcggacccccgcggtgcagcagcgcccccgcgagaaggccggcaccagcacgtaatagtagattttgtggtggacggtccagtcggccggccggtgcggccggtcgtcggcggcgtcggccgcgcgggcctgggtgttgtgcagcagccggccgtcgttgcggttaaagtcggccgtcgccacgttgcacgccgccgcgtagacgggctcgtgcccccccgcgtcaatccggcagtctcggtggcggtccagggccgcgtgtcgcataaggccgtcgcagtcccacacgaggggcggcagcagcgccgggtcgcgcatcaggtgattcagctcggcctgagcctgcccgcccagctccgggcccggcagggtaaagtcgtccaccagctgggccagggcctcgacgtgggccaccaggtcccgatacacggccatgcactcctcggggaggtcgcccccgaggtaggtcacgatgtacgagaccagcgagtagtcgttcacgaacgccgcgcatcgcgtgttgttccagtagctggtgatgcactgagtcacgagccgcgccagggcgcagaacacgtgctcgttgccgtgaatcgcggcttgcagcaggtaaaacaccgccgggtagctgcggtcctcgaacgccccgcggacggcggctatggtagccggcgccatggcgtggcggccaacgccgagctccaggccccgggcgtcacgaaacgccaccggacacagcgccaggggcaggttgccgttgaccacgcgccaggtggcctggatcgcccccggaccggccggggggacttcgccgccgggaagctcgacgtcggccacgcccgcgaagaagtcgaacgcggggtgcagctccagagccaggttggcgttgtcgggctgcatgaactgctccgcggtcatctggcactcggcgacccaccggacccggccgtgggcgaggcgctgccgccaggcgttcagaaaacgctgctgcatgtccgcgccggggccggccggggccgcgacgtacgccccgtacggattcgcggcctcgacggggtcgtggttcacgcccccgacggccgcgtcgatgttcatgagcgaaggatgacacacggtcccgaccgcgttctccatggacagccgcagaacctggtggtcctttccccaaaaaaacagctgccggggagggaacgcgcggggctccgggtggccgggggcgggcaccaggtccccggcgtgcgcggcgaagcgctccatggccgggttgaacagccccaggggcaggacgaacgtcaggtccatggcgcccaccagggggtagggcacgttggtggcggcgtagatgcgtctctccagggcctccaggaagaccagcctgtcgcctatggccaccagatccgcgcgcacgcgcgttgtctggggggcgctttcgagttcatccagcgtctcccggttcgcctcgagttgctcctcctgcatatccagcaggtggcggcccacgtcgtccaggctccgcacggccttgcccatcaccagcgccgtgacgaggttggccccgttcaagaccatctcgccgtaggtcaccggcacgtcggcctcggtgtcctccaccttcaggaaggactgcaggaggcgctgtttgatggcggcggtggtgaccagcaccccgtcgaccggccgcccgcgcgtgtcggcgtgcgtcaggcggggcacggccacggacggctgcgtcgccgtggtcaggtccacgagccaggcctcgatggcctcgcggcgatggcccgccttgcccaggaagaagctcgtgtcgcaaaagctccgcttcagctcggcgaccagggtcgcccgggcaaccctggtcgccaggcgcccgttgtcgagatatcgttgcatgggcaacagcagggccaggggaggcgccttctccaacagcacgtgcagcatctggtcggccgtgccgcgctcaaacgcccccaggacggcctggacgttgcgcgcgagctgctggatggcgcgcagctggcgatgcaggctaatgcccgtcccgtccagggcctcccccgtgagcagggcaatggcctcggtggccaggctgaaggcggcgttcagggcccggcggtcgatgaccttcgtcatgtaattatgcacgggctgctcgacggggtgcgggccgtcgcgggcgatgaggggctggtggacctcgaactgcacacgcccttcgttcatgtaagccagctccgggaacttggtgcacacgcacgccacggacaggccgagctccagaaagcgcacgagcgacagggtgttgcagtaggaccccagcagggcgtcaaactctacgtcatacaggctgttttcgtcggagcgcacggcggcgaaaaaatcaaagagtctgcggtgggacgccacctcgatcgtactcaggatggagccggtgggcaggatggccgcggcgtaccggtaacccggggggtcgcgggcaggagcggccattgggttccttgggggattcgcaggctccatcaagccgagctcgggaaggccaagcccctcccgcacaacgcctcaccgccggcggacgcgactaacaacccacgggccgccaaaaccccaaggggcaacccgaccaacaacaggcgaggggaggaaaggcgtaaagggggcgttgggaggcaaaaagaaagaaaacacccagacgtaggcccgaggaccggccggcgtcctctgtccccgagcacccactgtgcccaacaggcacgggggcgagctgcccctgccttatatacccccccgccacacccccgttagaacgcgacgggtgccttcaagatggccctggtccaaaagcgtgctagaaaaaagttggtaaaggcggcaaagcagtccgccgccgccacccacatggcggcgccggccgcgcaggcgattcccagagaacgggcgcggaggggatccgtgcggggcagcagctggctggcggtgatccaatggaaaagcccgtcgggactgaacgtctcatgggcggccgccaccagggcgcacagggccgcgccgcccatgatcacgcacaacccccaaaacacgggtggcgacaacggcaggcgatcccgtttgatgttcacgtacaggaggagcgcccgtgccagccacgtgacatagtaggcgaggacggcggctataatacatgccggcgccaccgcccgtccggtccacccgtaatacatgcccgcggccaccagctccagcggcttgaggaccaggaacgaccaagcaaacatcaccacccgcttggaaaagaccggctgggtgtggggcggaagacgcgagtaggccgaactgacaaaaaaatcagacgtgccgtacgaggacagcgaaaactgttcatcgagcggcagttctccgtcctccccgccacacgcggcctcgtctaccagctcgcgatccaacaaaggaacatcatcccgcattgtcatggtcggtgcggggagccggcgaggcagcaaaaccgaaagtagtgctggcggcgcgggcccgggtccggacccaagcttcagggatggggggcggaggccaaaatcaaacaagcaccgcgcgggttctacacacaacccccacccgggtagtatccgcggatgcgagtgcctggcgaagtcacgtcccagcaggatataaacctcggccgttgggcccggaacccccgaaattcacacccacgccctgacgcccaaatcatgggtggatgtggttcgcgagccgcacatccgtgcgtccgccctcccccgcgggctgatgacgtggcggttagtcagtgggaaggcagggggaaagatgggttgggggaggaaacgaagaaaacacccagagggccacgtcgggaatgcgcccggagttgtccttaaaaggccggccgtgcgtgacggaagccgtcgtttgcccaagcaccgacgccgcgatccacagtggggggagttcctccgtccggccacaaccctacgcgcgggcggcacgcgcgagagcaacccacgggtcccgttcgcgccaccgccagcccttgctcccaccaccctcctcccaccaccccactattcccccccccaagtccgccccgtggctcgccggccatggagctcagctatgccaccaccctgcaccaccgggacgttgtgttttacgtcacggcagacagaaaccgcgcctactttgtgtgcggggggtccgtttattccgtagggcggcctcgggattctcagccgggggaaattgccaagtttggcctggtggtccgggggacaggccccaaagaccgcatggtcgccaactacgtacgaagcgagctccgccagcgcggcctgcgggacgtgcggcccgtgggggaggacgaggtgttcctggacagcgtgtgtctgctaaacccgaacgtgagctccgagcgagacgtgattaataccaacgacgttgaagtgctggacgaatgcctggccgaatactgcacctcgctgcgaaccagcccgggggtgctggtgaccggggtgcgcgtgcgcgcgcgagacagggtcatcgagctatttgagcacccggcgatcgtcaacatttcctcgcgcttcgcgtacaccccctccccctacgtattcgccctggcccaggcgcacctcccccggctcccgagctcgctggagcccctggtgagcggcctgtttgacggcattcccgccccgcgccagcccctggacgcccgcgaccggcgcacggatgtcgtgatcacgggcacccgcgcccccagaccgatggccgggaccggggccgggggcgcgggggccaagcgggccaccgtcagcgagttcgtgcaagtgaagcacatcgaccgtgttgtgtccccgagcgtctcttccgcccccccgccgagcgcccccgacgcgagtctgccgcccccggggctccaggaggccgccccgccgggccccccgctcagggagctgtggtgggtgttctacgccggcgaccgggcgctggaggagccccacgccgagtcgggattgacgcgcgaggaggtccgcgccgtgcatgggttccgggagcaggcgtggaagctgtttgggtcggtgggggctccgcgggcgtttctcggggccgcgctggccctgagcccgacccaaaagctcgccgtctactactatctcatccaccgggagcggcgcatgtcccccttccccgcgctcgtgcggctcgtcggtcggtacatccagcgccacggcctgtacgttcccgcgcccgacgaaccgacgttggccgatgccatgaacgggctgttccgcgacgcgctggcggccgggaccgtggccgagcagctcctcatgttcgacctcctcccgcccaaggacgtgccggtggggagcgacgcgcgggccgacagcgccgccctgctgcgctttgtggactcgcaacgcctgaccccgggggggtccgtctcgcccgagcacgtcatgtacctcggcgcgttcctgggcgtgttgtacgccggccacggacgcctggccgcggccacgcataccgcgcgcctgacgggcgtgacgtccctggtcctgaccgtgggggacgtcgaccggatgtccgcgtttgaccgcgggccggcgggggcggctggccgcacgcgaaccgccgggtacctggacgcgctgcttaccgtttgcctggctcgcgcccagcacggccagtctgtgtgagatatcccaataaagtgcagtcgttttctaacccacggatgccgttgtatgcctatacgggggactatggggggggaaaggaaaggaaacaggaatggagaagggaaaggaacagaggcggtagcggacgcacggcggacacaataacaaacagaccgcggacacggagggagtcggttgggttgggcgtggacgccgctgcgtccacacacccgtttattcgcgtctccacaaaaatgggacgcacgttcggaccaccctaaggatgcccgccagggccgcggtaatcataacgacccccagcgcggacgcggccagaaacccgggggcgatggtggcgatgggcagcgtgtcaaaggccagcagatgaatcacagttccgttggggaacaacaacagggccacggacggcacgtcgctggaaaacacgttcggggtgcccgccaccggcccctgggccagctgctgttgggtggcatccgtgtccaccagcagcaccgacatgacctccccggccggggtgtagcgcagaaacacggcccccacgaggccgaggtcgcgccggttttcggtgcgcaccagccgcttcggctcaatctcccgcgcgtgcccttcgcaggtggcggtgagataggtgataaacagcgggcggcggacgtcaacgcccgtaagcttgtatccgatcccgcggggcaagggggtgtgggtgacgacgtagctggcgttgtgggtgatgggcacgaggatccggggctccgcgttgtgcgacgggccgctacactggtgggtggcctccgggacgaaggcgcggatcagggcgttgtagtgcgcccagcgcgtgagaacggaggccacgccgcgggtctgttgtgccatgacgtccgccgggatgtcggatcgggtggccatggccagcgcgtccaggatgaacccgccctcggcgagatcgaagcgcagggaagctgcgcatggggaaaagtggtccgggagccagaagaggtttttctggtggtcggtcctggctagcgcggcccggagatcggcgtgggtcgccgcggcgacgtcggacgtacacagggccgtggttatgaggaggccccggcgggcgcgttcccgctgctcggccgagggcgcgcccgccaggaacggcgcccggaggacggccgtggcgtaaaacagcgctcggcggaccatcggggcggttagcgcgcggccgccgagaaactcggcgtacagggcgtcgatcaggcgggccgcgctcggggccaccgcgccataggccgcggggctgtccaacacgaacgccagctgatagcccagcgcgtgcgccaccaggctctgctctcgctcgaggatcgcggccaccagatgcccgaggcgcgcctccagccgcaggcgggccgccgggtccaacacggacacgttcaggaacaccgagtcggccgcgcagcccgctgctccccgggcggccaggccggccagcacgcgcgagtgggccaaaaagcccagcaggtcggagaggcgaatcgcgtcgtgggcgtgggccgcgttgacgaacgcaaaccccgacgaggcgagcagccccgcgaggcgccagaacagggacggacgcgcgtccgtgccggagcccgggtcctcccccaaaaactccgcataggcccgcgacatatactgggcgtagttcgtgctctcctcggggtagccggccacccgccggagggcgtccagcgccgagccgttgtcggcgggcgtcggggcccccaggacaaagacgcgatacctggggccggccggaggcccggggagcaccgcgggggcgttttcgtcggtcggatttccgacccgagcgagggtcttgtccgcaggcaccactatgatctcggccggagggctgtcccgcatcgatatcacgagccccatgaagcccttcccgtatcgcgcgcgcacgagcgcggcgtcgcacccgaacgccagcccgcccgtcgtccagacgcccacgggccacgtcgaggccgacggggagaggtacacgtaccgacccggagtccgtagcaggcccctggcggccagccaggtcacggatgcgttgtgcagatgcgcgatgctcaggttcgtcgtcggatgcctcggtgtccccgcgggcggccccgggggcggcgcgttgcgtcggccgtccgggtgcctctcggtcgccccgtcgtctccccgcgggaacgtaagcccctcgcggtccggcgcggccgcgaatgttacccaggcccgggaccgcaacagcgcggaggcgccggggttgtgcgacagtcccttgagctgggtcacctcggcggggggacgggacgtgggccccgcctcggggagctcgggcaggctcgcgttccgaggccggccgagcagataggtctttgggatgtaaagcagctgcccggggtcccgaggaaactcggccgtggtgaccaacacgaaacaaaagcgctcggcgtaccaccgaagcatgggcacggatgccgtagtcaggttgagttcgcccgggggcgccaagcgtccgcgctgggggtcgctggcgtcgggggtgttgggcaaccacagacgcccggtgtttgtgtcgcgccagtacgtgcgggccaaccccagaccgtgcaaaaaccacgggtcgatttgctccgtccagtacgtgtcatggcccccggcaacgcccaccaggacccccatcaccacccacagaccggggcccatggtcgtcgtcccggctgccagtccgcagatgggggggggtgtccgtacccacggcccaaagaggctccgcacctcggaggctatcggaggccctttgttgccgtaagcgcgggccaaaggatggggtggggtgagggtaaaagcacaaagggagtaccagaccgaaaacaaggacggatcggcccgctccgtttttcggtggggtgctgatacggtgccagccctggccccgaacccccgcgcttatggacacaccacacgacaacaatgccttttattctgttcttttattgccgtcatcgccgggaggccttccgttcgggcttccgtgtttgaactaaactccccccacctcgcgggcaaacgtgcgcgccaggtcgcgtatctcggcgatggacccggcggttgtgacgcgggttgggatcatcccggcggtgaggcgcaacagggcgtctcgacacccgacgggcgactgatcgtaatccaggacaaatagatgcatcggaaggaggcggtcggccaagacgtccaagacccaggcaaaaatgtggtacaagtccccgttgggggccagcagctcgggaacgcggaacagggcaaacagcgtgtcctcgatgcggggcagagaccccgcgccgtcctcggggtcggggcgcggggtcgccgcggcgacccccgtcagccggccccagtcctcccgccacctcccgccgcgctgcaggtaccgcaccgtgttggcgagtagatcgtagacacggcgaatggcggacagcatggccaggtcaagccgctcgcccgggcgttggcgtctggccaggcggtcggcgtgttcggcctccggaaggacacccaggaccaggttcgtgccgggcgcggtcgggggcatgagggccacgaacgccaacacggcctggggggtcatgcttcccatgaggtaccgcgcggccgggtagcacagcagggaggcgatagggtgccggtcgaaaacaagggtgagggccgggggcggggcttgcgggcccacagcctcccccccgatatgaggagccaaaacggcgtccgtcgccgcataaggcgtgctcattgttatctgggcgctggtcattaccaccgccgcctccccggccgatatctcgccgcggtccagacggtgctgcgtgttgtagatgttcgtcagggtctcggaggcccccagcacctgccagtaagtcatcggctcggggacgtagacgatattgtcgcgcggccccagggcctccatcagctgcgcggaggtggtggtcttccccaccccgtggggtccgtctatataaacccgcagcagcgtgggcagctccggatccccgcgggctccggaggccccctggcgatggctaggacgggacgccgcgcggccgtcggtaggcccgctcgcacgagcagcctgaccgaacgcaggcgcgtgctgttggccggcgtgagaagccatacccgcttctacaaggcgttcgcccgagaggtgcgggagttcaacgccaccaggatttgtggaacgctgctgacgctgatgagcgggtcgctgcagggtcgctcgctgttcgaggccacgcgcgtcaccttaatatgcgaagtggacctcgggccgcgccgcccagactgcatctgcgtgttcgaattcgccaatgacaaaacgttgggaggtgtgtgcgtcatcctggagctaaagacatgcaaatcgatttcttccggggacacggccagcaaacgcgaacagcggaccacgggcatgaagcagctgcgccactccctgaagctgctgcagtcgctcgcgcctccgggggacaaggtcgtctacctgtgtcctattttggtgtttgtcgcgcagcgtacgctgcgcgtcagccgcgtgacccggctcgtcccgcaaaagatctccggcaacatcaccgcggccgtgcggatgctccaaagcctgtccacgtatgccgtgccgccggaaccgcagacccggcggtcgcggcgccgggtcgccgcgaccgccagaccgcaaaggcccccctccccgacacgtgacccggaaggcacggcgggtcatccggccccaccagagagcgaccccccctccccaggggtcgtaggcgtcgctgcggagggtgggggtgtgcttcagaaaatcgcggcgcttttttgcgtgccggtggccgccaagagcagaccccggaccaaaaccgagtgaggttctgtgtgttgtttttttttttttttttcctcgttttgttttctcttctttcccccccccctcccccgcttctggccaagcatcctcacctgcttaagcggaacccgcgggcgcgcggggactcatttgtcgccggcgacacccacccgacaacagcccctgggtgtcgaccgctgtcgcccccgtctgtcgcctctcccttttttccccccctcaaagaacgtggtgttgggcgccggccaattcttcccggagcgccgtcgtcgcccgcccgccgccctcgaacatggacccgtactaccctttcgacgcgctggacgtttgggaacacaggcgcttcatcgtcgccgactccaggagcttcatcacccccgagttcccccgggacttctggatgttgcccgtgttcaacatcccccgggagacggcggcggagcgggcggcagtgctgcaggcccagcgcaccgcggccgcggcggccctggagaacgccgccctccaggccgccgagctgcccgtcgacatcgagcgccggatacgcccgatcgagcagcaggtgcatcacatcgccgacgccctggaggcgctggagaccgcggcggccgcggccgaagaggcggatgccgcgcgggacgccgaggcgaggggggagggcgctgcggacggggcagcgccgtcgcccaccgcgggccccgccgccgcggagatggaggttcagatcgtacgcaacgacccgccgctacgatacgataccaacctccccgtggatctgctacacatggtgtacgcgggccgcggggccgcgggttcgtcgggagtcgtctttggtacctggtaccgcacgatccaggaacgcaccatcgcggacttccccctgaccacccgcagcgccgactttcgagacgggcgcatgtccaagaccttcatgaccgcgctggtcctgtctctgcagtcgtgcggccggctgtacgtgggccagcgccactattccgccttcgagtgcgccgtgctgtgtctgtatctgctgtaccgaaccacccacgagtcctcccccgatcgcgatcgcgctcccgttgcgttcggggacctgctggcccgcctgccgcgctacctggcgcgtctggccgcggtaatcggcgacgagagcggacgcccgcagtaccgctaccgcgacgacaagctgcccaaagcgcagttcgcggcggccggcggccgctacgagcacggggccctggccacccacgtcgtgatcgccacgttggtgcgccacggggtgctaccggcggccccgggcgacgttccccgagacaccagcacccgcgtgaaccccgacgacgtggcccaccgcgacgacgtcaaccgcgccgccgccgcgtttttggcacgcggccacaacctcttcctgtgggaggaccagacgctgctgcgggcgaccgccaacaccattacggccctggccgtgcttcggcggctcctcgcgaacggcaacgtgtacgcggaccgcctcgacaaccgcctgcagctgggcatgctgatcccgggagccgtcccggcggaggccatcgctcggggggcgtccggattggactcgggcgccataaaaagcggcgacaacaacctggaggcgctgtgcgttaactatgtacttccgctgtatcaggcagaccccacggtcgagctgacccagttgtttccggggctggccgccctgtgcctggacgcccaggcggggcggccactggcgtcgacgaggcgcgtggtggatatgtcgtcgggcgcccgccaggcggcgctcgtgcgcctcaccgcgctggagctcatcaaccgcacccgcacaaacaccacccctgtgggggagattattaacgcccacgatgccttggggatacaatacgaacaggggcctgggctgctcgcccagcaggcacgcatcggcttggcgtcaaacaccaagcgattcgccacgttcaacgtgggcagcgactacgacctgttgtactttttgtgtctcgggttcattccccagtacctgtccgtggcctagggaagggtgggggtggtggtggtggggtgtttttctgttgttgtttctggtccgcctggtcacaaaaggcacggcgccccgaaacgcgggctttagtcccggcccggacgtcggcggacacgcaacaacggcgggccccgtgggtgggtaagttggttcgggggcatcgctgtattcccttgcccgcttccaccccccccccccttcccgttttgtttgtttgtgcgggtgcccatggcgtcggcggaaatgcgcgagcggttggaggcgcctctgcccgaccgggcggtgcccatctacgtggccgggtttttggccctgtacgacagcggggacccgggcgagctggccctggacccagacacggtgcgtgcggccctgcctccggagaaccccctgccgatcaacgtagaccaccgcgctcggtgcgaggtgggccgggtgctcgccgtggtcaacgaccctcgggggccgttttttgtggggctgatcgcgtgcgtgcagctggagcgcgtcctcgagacggccgccagcgccgctatttttgagcgccgcggacccgcgctctcccgggaggagcgtctgctgtacctgatcaccaactacctgccatcggtctcgctgtccacaaaacgccggggggacgaggttccgcccgaccgcaccctgtttgcgcacgtggccctgtgcgccatcgggcggcgccttggaaccatcgtcacctacgacaccagcctagacgcggccatcgctccgtttcgccacctggacccggcgacgcgcgagggggtgcgacgcgaggccgccgaggccgagctcgcgctggccgggcgcacctgggcccccggcgtggaggcgctcacacacacgctgctctccaccgccgtcaacaacatgatgctgcgtgaccgctggagccttgtggccgagcggcggcggcaggccgggatcgccggacacacgtaccttcaggcgagcgaaaaatttaaaatatggggggcggagtctgcccctgcgccggagcgcgggtataaaaccggcgccccgggtgccatggacacatcccccgccgcgagcgttcccgcgccgcaggtcgccgtccgtgcgcgtcaagtcgcgtcgtcgtcttcttcttcttcttttccggcaccggccgatatgaaccccgtttcggcatcgggcgccccggcccctccgccgcccggcgacgggagttatttgtggatccccgcctctcattacaatcagctcgtcaccgggcaatccgcgccccgccacccgccgctgaccgcgtgcggcctgccggccgcggggacggtggcctacggacaccccggcgccggcccgtccccgcactacccgcctcctcccgcccacccgtacccgggtatgctgttcgcgggccccagtcccctggaggcccagatcgccgcgctggtgggggccatcgccgccgaccgccaggcgggtgggcttccggcggccgccggagaccacgggatccgggggtcggcgaagcgccgccgacacgaggtggagcagccggagtacgactgcggccgtgacgagccggaccgggacttcccgtattacccgggcgaggcccgccccgagccgcgcccggtcgactcccggcgcgccgcgcgccaggcttccgggccccacgaaaccatcacggcgctggtgggggcggtgacgtccctgcagcaggaactggcgcacatgcgcgcgcgtacccacgccccctacgggccgtatccgccggtggggccctaccaccacccccacgcagacacggagacccccgcccaaccaccccgctaccccgccaaggccgtctatctgccgccgccgcacatcgcccccccggggcctcctctatccggggcggtccccccaccctcgtatcccccagttgcggttacccccggtcccgctcccccgctacatcagccctcccccgcacacgcccacccccctccgccgccgccgggacccacgcctccccccgccgcgagcttaccccaacccgaggcgcccggcgcggaggccggcgccttagttaacgccagcagcgcggcccacgtgaacgtggacacggcccgggccgccgatctgtttgtgtcacagatgatggggtcccgctaactcgcctccaggatccggacttggggggggtgtgtgttttcatatattttaaataaacaaacaaccggacaaaagtatacccacttcgtgtgcttgtgtttttgtttgagaggggggggtggagtgggggggaaagtgggccgaatgacacaaaaattaggtcggaggggtgaggggggggggctaggagccgaaccgatggcccccacacgcgacggaaggcccggaagactaccacggggagggggtgtggaaagcgaccggtcgcagggagacggggttggtttggggttggtttggggttggttttcccgttagcacatgtctgcatttgtttttctagtcacacgcccccccccccccaaataaaaaccaaggcaaaacaataccagaagtcatgtgtatttttgaacatcggtgtctttttatttatacacaagcccagctcccctcccctcccttagagctcgtcttcgtctccggcctcgtcctcgttgtggagcggagagtacctggctttgttgcgcttgcgcagaaccatgttggtgaccttggagctgagcagggcgctcgtgcccttctttctggccttgtgttccgtgcgctccatggccgacaccaaagccatatatcggatcatttctcgggcctcggccaacttggcctcgtcaaacccgcccccctccgcgccttcctccccctccccgcccacgcccccggggtcggaagtcttgagttccttggtggtgagcggatacagggccttcatgggattgcgttgcagttgcaggacgtagcggaaggcgaagaaggccgcgaccaggccggccaggaccagcagccccacggcaagcgccccgaaggggttggacataaaggaggacacgcccgagacggccgacaccacgccccccactactcccatgactaccttgccgaccgcgcgccccaagtcccccatcccctcgaagaacgcgcacagccccgcgaacatggcggcgttggcgtcggcgcggatgaccgtgtcgatgtcggcaaagcgcaggtcgtgcagctggttgcggcgctggacctccgtgtagtccagcaggccgctgtccttgatctcgtggcgcgtgtagacctccaggggcacaaactcgtggtcctccagcatggtgatgttcaggtcgatgaaggtgctgacggtggtgacgtcggcgcgactcagctggtgagagtacgcgtactcctcgaagtacacgtagcccccgccgaagatgaagtagcgccggtggcccacggtgcacggctcgagcgcgtcgcgggtgaggcgcagctcgttgttctcgcccagctgcccctcgatcagcgggccctggtcttcgtaccgaaagctgaccagggggcggctgtagcacgtccccggccgcgagctgacgcgcatcgagttctgcacgatcacgttgtccggggcgacgggcacgcacgtggagacggccatgacgtctccgagcatgcgcgcgctcacccgccggccgacggtggcggaggcgatggcgttggggttgagcttgcgggcctcgttccagagagtcagctcgtggttctgcagctcgcaccacgcgacggcgatgcgccccagcatgtcattcacgtggcgctgtatgtggttatacgtaaactgcagccgggcgaactcgatcgaggaggtggtcttgatgcgctccacggacgcgttggcgctgggcgcctcccgcagtggcgcgggcgtggcattccggggcttgcggtcctgctcccgcatgtactcccgcacgtacagctcggcgagcgtgttgctgaggaggggctggtacgcgatgaggaagccccccgtggccaggtagtactgcggctggcccaccttgatgtgcgtggcgttgtacttgcgcgcaaacatgcggtcgatggcctcgcgggcatcccggccgatgcagtcgcccaggtcgacgcgcgagagcgagtactcggtcaggttggtggtgaaggtggtcgagatggcgtcggaggagaagcggaaggagccgccgtactcggcgcggagcatctcgtccacctcctgccacttggtcatggtgcagaccgccggtcgcttcggcacccagtcccaggccacggtaaacttgggggtcgtcagcaagttgcgggtcgtcggcgacgtggcccgggccttcgtggtgaggtcgcgcgcgtagaagccgtcgacctgcttgaagcggtcggcggcgtagctggtgtgctcggtgtgcgacccctcccggtagccgtaaaacggggacatgtacacaaagtcgcccgtcgccagcacaaactcatcgtacgggtacaccgaccgcgcgtccacctcctcgacgatgcagttgaccgtcgtgccgtaccgatggaacgcctccacccgcgaggggttgtacttgaggtcggtggtgtgccacccccggctcgtgcgcgtggcgaccttcgccggcttgagctccatgtcggtctcgtggtcgtcccggtgaaacgcggtggtctccatgttgttccgcacgtacttggccgtggagcggcagacccccttggtgttaatcttgtcgatcacctcctcgaagggaacgggggcgcggtcctcgaatatccccataaactgggagtagcggtggccgaaccacacctgcgacacggtcacgtctttgtagtacatggtggccttgaatttgtacggggcgatgttctccttgaagaccaccgcgatgccctccgtgtagttctgcccctccgggcgcgtcgggcagcggcgcggctgctcaaactgcaccaccgtggcgcccgtcgggggcgggcacacgtaaaactgggcatcggcgttctcgaccttgatttcccgcaggtgcgcgcgcagcgtggcgtggccggcggcgacggtcgcgttggcgtcggggggcggggtcgcctcgggccgcttgggcggctttttggttttccgcttccgggccttggtggtcgcggggctcgggacggggggcggccgggaggcgggacccccgttcgccgcgacggtcgcggccacgccgcccgaggcgcggggggccgccggggccgccggggccgccgacgccaccgcggccaccagcgcccccacgaccagcgcgcaaatcaagccccccccgcgcatggcgggcctacgggggcgcgtcgctcccgccgcccgctagtctgggggcgaggtgctgcaggaccgagtagaggatggaaaaaacgtctcggtcgtaaaccacgaccgagcggggtccgatgcagccgtcggggccgctctcgacgatggccaccagcggacagtcggagttgtacgtgaggtacacgcccggcgggtagcggtacagaccttcggaggtcgggcggctgcagtcggggcggcgcaactcaagctccccgcaccggtagaccgacgcaaagagtgtggtggcgataatgagctcgcgaatatatcgccaggcggcgcgctgggtgggcgtgattccggaaacaccgtcaaaacagtagaacttttgaaactcgctgacggcccaatcagcgcccgaaccccccgcgcccatgatgaagcgggcgagttcctccttgaggtgcggcaggagccccacgttctcgacgctgtagtacagcgcggtgttggggggctgggcgaagctgtgggtggagtggtcgaacaggggcccgttgacgagctcgaagaagcgatgggtgatgctggggagcagggccgggtccacctggtggcgcagcagcgacgctcgcatgaaccggtgcgcgtcaaacacgcccggggcggcgcggttgtcgatgaccgtgcccgcgcccgccgtcagggcgcagaagcgcgcgcgcgccgcgaagccgttggcgaccgcggcgaaggtcgcgggcagcacctcgccgtggacgctgacccgcagcatcttctcgagctccccgcgctgctcgcgcacgcagcgcccgaggctggccagcgaccgcttggtcaggcggtccgcgtacagccgccggcgctcccgcacgtccgcggcggcccgcgtcgcgatgtcgccccagctctccggcccctgcgcccctggctcggggccgcgctccccgtcctcgctcgcgggcgtccccgcgccacgcctccgccccccctcctccgcggcggcccggggctcttcctcctcggcccccccggtcgcgccgccggcccccagccgcgccagcacgcggcgcagcgcctcctcgtcgcactgctcggggctgacgagccgccgcagcagcggcgtcgtcaggtggtggtcgtagcacgcgcgtatcagcgcctcgatctgatcgtcgggcgacgtcgcctggccgccgatgatcagggcgtccaccatgtccagcgccgccaggtggcccccgaacgcgcgatcgaagtgctccgcccgccgcccgaacagcgccagctccacggccaccgcggcggtctcctgctgcagctcgcgctgcgccagcgcgttcaggttgtcggcgaaggcgtccatggtggagtggcgggcgcgatcgccggacgccagccagaagcgcagctcgctgatggcgtacaggccgggcgtagtggcctgaaacacgtcatgcgcctccagcagggcgtcggcctcctcgcggacagaagagctatcggcgggcggcgggccggccctggccccgccgcccgccgcggtccgcgccagcgcctggtccagcacacagagcgctcgcgcgcgggcggcgtccgacagcccggcggcgtggggcaggtaccgtcgcagctcgttggcgtccagccgcacctgggcctgttgggtgacgtggttacagatgcggtccgccaggcggcgggcgatggtcgccccttggttcgcggtgacgcacagctcctcgaaacagaccgcgcacgggtgggacgggtcgctcagctccgggggcacgatgaggcccgaccccaccgccgccaccataaactcccggacgcgctccagcgcggccgtggcgccgctcgggggggtgatgaggtggcagtagttcagctgcttgagaaaattctcgacatcatgcaggaagcacagctccatgcggacgtccccgccgtacgtctgcagccggatctgctggtggtacggacagggtcgggccagacccatggtctcggtgaaaaaggcagagacgtcacccgtggtcgcgaacgtttccaggtggcccaggagccgctccccctcgcgccacgcgtactccaggagcaactccagggtgaccgacagcggggtgagaaaggcggcggcctgagcctccagccccggccgcaggtgccgccgcagcacgcgcacctggagcgcgttgagttttagctgggcgagcttccccaggccgatctgggggtcgcatcgtcgaagcagctctagctgaaaaacgtacgtctgtacctgcccgagcagggccaacagtttctgtcgggccgcagtgggctcggaaaccgcggccgggggcgcggccgccatggcgagtcacccggccgtgctgtggtttagttaaggtttgggggggggtgggtcagaggcgcgccccgcgcggactgatgcggcggcgggcccctgacatcccctctttatgcccgtcgcccgcccgcccgccccgccggtgtgccgtgattcgcggagtcggggccttgtgtttctttctttcccccccgaatccgttctttcttcctcacccccccctccccacacacccacccaggactcgccaccacaaggaggcgagagcccgtcgctaacccaaagacacagtcacgagacacgatatcgactgtagttgcgatcgtttattttatacacaacaccaacctttccttcgaccccccccacccccgcccctagagcatatccaacgtcaggtcctttttctccggtggtccctccccaaacggatcgtcgccgtgaaacgcccgctttcgggcgacgccggccgcccccgccgccgccgccaaaccgccgaacgacgccgcgtggtcatcctcgtcgccgaaatccccaaagttaaacacctccccggcggcgccgagctggctgaccagggcctccgcctcgtgggccacctccagggccgcgtcggtcgaccactcgccatgcccgcgctccagggcgcgggtggtaaactccatcatttcctcgctcaggtactcgtcctccagcagcgccagccagtcctcgatctgcagctgctgggtgcgggggcccaggctcttgacggtcgccacaaacacgctgctggcgaccgccgccccgccctccgcaatgatgccccggagctgctcgcacagcgaatgctcgtgggccccgcccccgagactcgacgccgcgcacacaaacccggccctggggcaggccaggacaaacttgcgggtgcggtcaaagatcagcagcgggcacgcgtttttgccgcccagcaggctggcccagttcccggcctgaaacacgcggtcgttgccggccatgccgtagtatttgctgatgctgaggcccagcacgaccatcgggcgcgcggccatcacgggccgcagcaggttgcagctcgcgaacatggacgtccaggcgccggggtgcgcgtcgagggagtccatcagcgcgcgggccccggcctccaggcccgcgccgccctgcggggcccaggcggccgccgcctgcacgctggggggacggcgggacccggcgatgacggccgtgagggtgtttatgaagtacgtcgagtggtcgcagtacctcaagatctggttggccatgtagtacatggccagttcgctcacgttattgggggccaggttgataaagttaatcgcgccgtagtccagggagaacctcttaatgaacgcgatggtctctatgtcctcgcgcgacaagagccgggcggggagctggttgcgctggagggcggtccagaaccactgcgggttcggctggttcgaccccgggggcttgccgttgggaaagatgaccgcgtggaactgcttcagcaggaagcccagcggtccgaggaggatgtccacgcgcttgtcgggcttctggtaggcgctctggaggctggcgacccgcgccttggcggcctcggacgcgttggcgctcgcgcccgcgaacaacacgcggctcttgacgcgcagttccttgggaaacccaagggtcacgcgggcaacgtcgccctcgaagctgctctcggcgggggccgtctggccggccgttaggctgggggcgcagatagccgccccctccgagagcgcgaccgtcagcgtcttcgccgacaggaacccgttgttgaacaggtccatgacgcgccgccgcagcaccggttggaattgattgcgaaagttgcgcccctcgaccgactgcccggcgaacaccccgtggcactggctcagggccaggtcctggtacacggcgaggttggaccgccgcgcgaggagctgcagcagggggcacggcccgcaggtgtacgggtccagcgacagcgacatggcgtggttggcctcggccagaccgtcgcggaacttaaagttgcgcccctcgatcaggttgcgcatcagctgttccacctcgcgatccaccagctgcttgatgttgttcaccaccgtgtgcagggcctcgcggttgccgataatcgtctccagcctccccagggccgtgggcaccgcctggtccacgtactgcagggcctcgagctcggccatgacgcgctcggtggccgcgcggtacgtctcctgcatgatggtccgggtgttctcggacccgtccgcgcgcttcagggccgagaaggcggcgtagttccccagcacgtcgcagtcgctgtacgcgctgttcatcgttccgaagaccccaatggccccccgggcggcgctcgcgaacttggggtggcgggcccgcagccgcatcagcgtcgtgtgcgcgcaggcgtggcgggtctcgaaggtacacaggttgcagggcacgtcggtctggcccgagtccgcgacgtagcgaaacacgtccatctcctggcgcccgacgatgactccgccgtcgcagcgctccaggtaaaacagcatcttggccagcagggccggagagaacccgcacagcatggccaggtgctcgccggcgaactcctgggttccgccgacgaggggcgccgtggggcgcccctcgtacccgggcaccacgtggccctcgcggtccagctgcgggttggccgccacgtgcgtgccgggcacgagaaagaagcggtaaaaggagggcttgctgtggtccttggggtccgccggcccggcgtcgtccacctcggtcaggtggagggccgaattggtgctgaacaccatggcgcccacgaggcccgcggcgcgcgccaggtacgccccgacggcgccggcgcgggccgcgggcgtttcctggccctcaagcaggggccacgtggtgatgtcggggggcggctcgtcaaagaccgccatcgacacgatggactccagggccagggcggcgtcgcccgccatcaccgaggccaggcgctgctcaaacccgcccgccgggcccttgttcccggcgtcgcgcgcgccccgctggggcttaccctggctggcctcgaaggccgtgaacgtaatgtcggcggggagggccgcgccctcgtggttttcgtcgaacgccaggtgggcggccgcgcgggccacggcgtccacgttccgggcacgcagggccacggcggcgggcccgacgaccgcctcgaacagcaggcgggcgagggggcggttgaaaaacggaagggggtagttgaaattctccccgatcgatcggtggttgcagttaaacggatcggcgatgacccggctaaaatccggcataaacatctgcagcggatacacggggatgcggtgaacctccgcgtccccgatggttaccttgtccatcccgcccagatgcaggaaggtgttgctgatgcacacggcctcccggaagccctccgtgatcaccagatacagcaaggcccggtccgggtccagtccgagccgctcgcacagcgcgtcccccgtcgtctcgtgctttaggtcgcagggccggggcgcgtagtccgcgaagccaaaatgcgggcgcgcccgctcgcagagccgcgtcaggttgggggcctgggtgctgggggccaggtggcggccgccgtgaaagacgtaaacggacgggctgtagtgcgagggcataagcttgagggacaccgcggtccccccaaggcccgtcgtgcgggacccgacgaccgcggccacgttggcctcaaacccgctctccacggtcaggccgacgatgaggggcgcgacggcgacgtccgcgtcgccgctgcgcgccgacagtagcgacagcagctccaggccttcggccggacaggcgcggccatacacgtaccccatcggccccggaggaaccttgacggtggtcgtcgttttgggcttggtgtccatggctttcgggagatcggcgaccggcaggaacgggggcccggcaagacgaccgggggcagacgggggaggccgcgcgtggtcgacggctgctgcccgccgtcgtctctccgatggggtcgaatgccggcgctgggggtggggtctacacccgcccgttcgccgagcggcccctggtgggggtgggatgggtgggatggggtgggcgagaatggcccgccaccggatcgcgccggacgggggggcccggggttgggcaaggtttgggcgcaaggctccagcggcgattcgagaggcctgcggatggcggcccagagctgggtatgctcggccggggcggccggtatatgtacggcgtgctgggaggggcggcgtcgggccccgcccacggtccgccacgccccgcgcgtcatcggcagggggcgtggccgcccttctaaaaaaagtgagaacgcgaagcgttcgcactttgtcctaataatatatatactattaggacaaagtgcgaacgcttcgcgttctcactttttttagaagggcggccacgccccctttgacgtcacgctcacccgggcggccggccgcccataagcgcggcctgccgggccgataaaaagaaaccgcggcgcccccgcggacaccacacactggctctcgaaccccggacgcgcagaagggacccgggcgcgggtccgccggtaagagccggggggaacatcggcaccgccatcccaccccgagctgttgggtgggcgggtgggggggctggtgaggcggtggtgggagggggcggcgtatagcaggacaacgaccggcggcgatgttttgtgccgcgggcggcccggcttcccccggggggaagccggcggctcgggcggcgtctgggttttttgccccccacaacccccggggagccacccagacggcaccgccgccttgccgccggcagaacttctacaacccccacctcgctcagaccggaacgcagccaaaggccctcgggccggctcagcgccatacgtactacagcgagtgcgacgaatttcgatttatcgccccgcgttcgctggacgaggacgcccccgcggagcagcgcaccggggtccacgacggccgcctccggcgcgcccctaaggtgtactgcgggggggacgagcgcgacgtcctccgcgtgggcccggagggcttctggccgcgtcgcttgcgcctgtggggcggtgcggaccatgcccccgaggggttcgaccccaccgtcaccgtcttccacgtgtacgacatcctggagcacgtggaacacgcgtacagcatgcgcgccgcccagctccacgagcgatttatggacgccatcacgcccgccgggaccgtcatcacgcttctgggtctgacccccgaaggccatcgcgtcgccgttcacgtctacggcacgcggcagtacttttacatgaacaaggcggaggtggatcggcacctgcagtgccgtgccccgcgcgatctctgcgagcgcctggcggcggccctgcgcgagtcgccgggggcgtcgttccgcggcatctccgcggaccacttcgaggcggaggtggtggagcgcgccgacgtgtactattacgaaacgcgcccgaccctgtactaccgcgtcttcgtgcgaagcgggcgcgcgctggcctacctgtgcgacaacttttgccccgcgatcaggaagtacgaggggggcgtcgacgccaccacccggtttatcctggacaacccggggtttgtcaccttcggctggtaccgcctcaagcccggccgcgggaacgcgccggcccaaccgcgccccccgacggcgttcggaacctcgagcgacgtcgagtttaactgcacggcggacaacctggccgtcgagggggccatgtgtgacctgccggcctacaagctcatgtgcttcgatatcgaatgcaaggccgggggggaggacgagctggcctttccggtcgcggaacgcccggaagacctcgtcatccagatctcctgtctgctctacgacctgtccaccaccgccctcgagcacatcctcctgttttcgctcggatcctgcgacctccccgagtcccacctcagcgatctcgcctccaggggcctgccggcccccgtcgtcctggagtttgacagcgaattcgagatgctgctggccttcatgaccttcgtcaagcagtacggccccgagttcgtgaccgggtacaacatcatcaacttcgactggcccttcgtcctgaccaagctgacggagatctacaaggtcccgctcgacgggtacgggcgcatgaacggccggggtgtgttccgcgtgtgggacatcggccagagccactttcagaagcgcagcaagatcaaggtgaacgggatggtgaacatcgacatgtacggcatcatcaccgacaaggtcaaactctccagctacaagctgaacgccgtcgccgaggccgtcttgaaggacaagaagaaggatctgagctaccgcgacatccccgcctactacgcctccgggcccgcgcagcgcggggtgatcggcgagtattgtgtgcaggactcgctgctggtcgggcagctgttcttcaagtttctgccgcacctggagctttccgccgtcgcgcgcctggcgggcatcaacatcacccgcaccatctacgacggccagcagatccgcgtcttcacgtgcctcctgcgccttgcgggccagaagggcttcatcctgccggacacccaggggcggtttcggggcctcgacaaggaggcgcccaagcgcccggccgtgcctcggggggaaggggagcggccgggggacgggaacggggacgaggataaggacgacgacgaggacggggacgaggacggggacgagcgcgaggaggtcgcgcgcgagaccgggggccggcacgttgggtaccagggggcccgggtcctcgaccccacctccgggtttcacgtcgaccccgtggtggtgtttgactttgccagcctgtaccccagcatcatccaggcccacaacctgtgcttcagtacgctctccctgcggcccgaggccgtcgcgcacctggaggcggaccgggactacctggagatcgaggtggggggccgacggctgttcttcgtgaaggcccacgtacgcgagagcctgctgagcatcctgctgcgcgactggctggccatgcgaaagcagatccgctcgcggatcccccagagcacccccgaggaggccgtcctcctcgacaagcaacaggccgccatcaaggtggtgtgcaactcggtgtacgggttcaccggggtgcagcacggtcttctgccctgcctgcacgtggccgccaccgtgacgaccatcggccgcgagatgctcctcgcgacgcgcgcgtacgtgcacgcgcgctgggcggagttcgatcagctgctggccgactttccggaggcggccggcatgcgcgcccccggtccgtactccatgcgcatcatctacggggacacggactccattttcgttttgtgccgcggcctcacggccgcgggcctggtggccatgggcgacaagatggcgagccacatctcgcgcgcgctgttcctccccccgatcaagctcgagtgcgaaaaaacgttcaccaagctgctgctcatcgccaagaaaaagtacatcggcgtcatctgcgggggcaagatgctcatcaagggcgtggatctggtgcgcaaaaacaactgcgcgtttatcaaccgcacctccagggccctggtcgacctgctgttttacgacgataccgtatccggagcggccgccgcgttagccgagcgccccgcagaggagtggctggcgcgacccctgcccgagggactgcaggcgttcggggccgtcctcgtagacgcccatcggcgcatcaccgacccggagagggacatccaggactttgtcctcaccgccgaactgagcagacacccgcgcgcgtacaccaacaagcgcctggcccacctgacggtgtattacaagctcatggcccgccgcgcgcaggtcccgtccatcaaggaccggatcccgtacgtgatcgtggcccagacccgcgaggtagaggagacggtcgcgcggctggccgccctccgcgagctagacgccgccgccccaggggacgagcccgcccccccagcggccctgccctccccggccaagcgcccccgggagacgccgtcgcatgccgaccccccgggaggcgcgtccaagccccgcaagctgctggtgtccgagctggcggaggatcccgggtacgccatcgcccggggcgttccgctcaacacggactattacttctcgcacctgctgggggcggcctgcgtgacgttcaaggccctgtttggaaataacgccaagatcaccgagagtctgttaaagaggtttattcccgagacgtggcaccccccggacgacgtggccgcgcggctcagggccgcggggttcgggccggcgggggccggcgctacggcggaggaaactcgtcgaatgttgcatagagcctttgatactctagcatgagccccccgtcgaagctgatgtcccgcatcttgcaataaatgtctgcggccgacacggtcggaatttccgcgtccgctggtttctctgcgttgcgtctgaccacgagcacaaacgtgctctgccacacgtgggcggcgaaccggtagccggggcacgcggtcagcatccgatcgatgagccggtagtgcaggtgggccgacgtgccggggaagatgacgtacagcatgtggcccccgtacgtggggtccgggtaaaaaagaaaccgggggtcgcacgccccccctccgcgcaggatcgtgtgcacgaaaaagagctcgggctggccgagcgtatcggccaggaggtcctggaggggggtgctgtggcggtcggccagcacgaccagggaggccagaaaggtgcggtgctcaaagatcgtattgatctgctgcacgaaggccaggatgagggcctcgcggctgacggtggccagccgcccgtcgcccgcgctgcacgcggggcagcagcccccgatccccaggtagtagcccatgcccgagagggtcaggcagttgtcggccacggtctggtccaggctgaaggggagcgacacgggggtcgtcttcaccaggggcacggagagcgagcgcacgatggcgatctcctcggagggcgtctgggcgagggcggcgaagaagccgcggtagcgacggcgctcgtgcaggcagagctccagcctgcgcgcgtgcgacggcaggctcttgcgggaggcccggcgctccacgccggggttcccggcggcggaaaagcgcgaccgccgccgggtcttgtcgcggccgggcccgggccgggagccggagcgacggggggcgatgtcatacataggtacagagggtgtgctccagggacaggagagagatcgagtgtcgtctgagcagcgcgccggcctcgcggacaaatgtggccagcgcggtgggcttcggcacaaatacctggtacgtcttgaaggtgtagatgagggcccgcagggctatacagacccgcccctcgaactcgttgccgcaggccaacttggccttgtgaagctgcagctcgtcgcgatggtcggcgcgggggtggccaaacaggacccaggggtcgacttccatctccgtgatggcgcacatcggatcgcagaacatgtgcttgaagatggcctcggggcccgcggcccgaagcaggctcacgaaccggcccccgtccccgggctgcgcctcggggtccgcctcgagctggtccacgaccggcactatgcagtcgaagaggctggtgttgttctccgagtagcggacgacggacgccctcaggcgtcgcatggccagccagtaggcccgcaccagcaacagattgcacagcaggcattccccgccggtgcgcccgcgcccccggccgtgcttcagcacggtggccatcagcgggcccaggtccaggtcgggctggggctggggctcggcgaactgcgcaaaacgcggggccgcgtcgcgcatgcgcgccccgcggtgcgcttcccaggactcgctgaccgcggcgcggcgggcgtccgcggcggcgcgcagccggggccccgactcccagacggcgggggtgccggcgagcagcagcaggatcaggtcggcgtacgcccacgtctccggctcacccccctgcgccagcgccccggcggcggcctcgaactccccgttgcgggcggcggcgcgcgtgcagcagctgtctccgcccccgcgcttgccctcggtgcagtcgagcaggcgggcgcagtccttccagttcatcagggcggtggtgagggagggttgcgttcccgagcccccgcccgcccccgcccccgccccgtcatcgcccccggaggccagggtcccgatgagggcccgggttgcggactgcgcgaggaaggaatagttggagtactgcaccttggcggcgcccggggagggcgtcggcctgggttgcttctgggcgtggcgcccgggcaccccgccgtcggtccggaagcagcagtggagaaagaaatgccggtggatgtcgttgatggtcagggcgaagcgcgcgaaggagccgacaagggtcgccttcttggtgcgcaggaagtggtggtccatgacgtagacgaactcgaaggcggccacgaagatgctcgcggcgcagtggggcgcgcccaggcacttggcgcagaggaacgcgtaatcggccacccactggggcgagaggcggtaggcctgcttgtacagctcgatggtgcggcagaccagacaggggcggtccagcgcgaaggtgtcgacggacgccgcggcgaagggccccgtgtccaagagtccctctgccgtggggtctgcgggcgggccgcgggcggaccccggcccccgcccccccgaagcctcgcgcgcggccccgcgcggccgcgggggggcgggcgcgacgtcgctctccacgtcctcgtcgagcgcgctcgcgggcggcacgcctaccacgtgacaggccgccaggagctcggcgcacagggcctcgttaagagccagaaggtcgggatcgaaggccacatacggacgctcgaacgcgccctccttccagctgctgcccggcgactcttcgcgcacggcggcgctcgacggcacccccggggcggacgtcgccatggccggtcgagcggggcgcacgcgtccgcgaacgttacgggacgcgatccccgactgcgcgctgcggtcccagaccctggaaagtctagacgcgcgctacgtctcgcgagacggcgcgggggacgcggccgtctggttcgaggacatgacccccgccgaactagaggttatattcccgaccacggacgccaagctgaactacctctcgcggacgcagcggctggcctccctcctgacgtacgccgggcctataaaagcgcccgacggccccgccgccccacatacgcaggacaccgcgtgcgtgcacggcgagctgctcgcccgaaagcgcgaacggttcgcggcggtcattaaccggttcctggacctgcaccagatcctgcggggctgacgcgcgcttcggcggggcaccggcaccgggaccgacttgttttacataacagtagggggtgggggaacgcgcacccttgcccggtcgcgatggcggggatggggaagccctacggcggccgcccgggggacgcgttcgagggtctcgttcagcgcatcaggctcattgttcccgccacgctgcgcggcgggggtggggagtcgggcccctactcgccatccaacccgccctcgagatgtgccttccagttccacggccaggatgggtccgacgaggccttcccgatcgagtacgtcctgcggctcatgaacgactgggccgatgtgccctgcaacccctacctgcgcgtgcagaacaccggcgtttcggtgctgtttcaggggttttttaaccggccccacggcgccccggggggcgcgatcacggcggagcagaccaacgtgattctgcactccaccgagacgacgggactgtccctcggagacctggacgacgtcaaggggcgcctcggcctggacgcccggccgatgatggccagcatgtggatcagctgctttgtgcgcatgccccgggtgcagctcgcgtttcggttcatgggccccgaggacgccgttcgcacgcggcggatcctgtgtcgcgccgccgagcaggccctcgcccgtcgccgccggtccaggcggtcccaggatgactacggggcggtggtggtggcggcggcgcaccactcttccggagcgcccgggccgggggtcgccgcctcgggcccgccagcgccgcccggacggggaccggcccgtccgtggcatcaggccgtgcagttgttccgggccccgcgtccgggccccccggcgcttctgttgctggcggcggggctgtttctgggggccgctatctggtgggcggttggcgcgcgcctatgaaagggggcgagccaccgtcccgcccgccagtgcatcccagacgcccgcgagccgcacatcccctccgctcccgcctccggcccgattcttacggcgcgacccaaggtcccgatggccgccccgcagtttcaccgccccagcaccattaccgccgacaacgtccgggcgctcggcatgcgcgggctcgtgttggccaccaacaacgctcagttcatcatggataacagctacccgcatccgcacggaacgcagggtgcggtgcgagagtttcttcgcgggcaggccgcggcgctgacggacctcggggtgacccacgccaacaacacgttcgccccgcagcctatgttcgcgggcgacgccgcggccgaatggctgcggccctcgttcggtcttaagcgcacgtattccccctttgtcgttcgcgaccccaagacccccagcaccccgtgagtcctcggcgggtccctccgcggccgtctctcgttgcccccctttcccccttcccgggtggttcaataaaaaacaccaacatacgatattcgcgtttgatacgtttattggggggggtgtagggcccaacgatcggcgattaacaacaccaaacaatcgagcgcgtctaacccagtaacatgcgcacgtgatgtaggctggtcagcacggcgttgctgcgctgaaacagcgccctgcgggtccgctgcagctgttgttgtatgcggcggcatgcgcggatcaaaaccgccagggcgctacgaccggtgcttcgtacgtagcgtcgcgacaagacggcatttgcctgtacgggcaaggggccaaattgcgagtgtggtgactggaggtggtcggcggccaatgggccgggtggttcgtcggcggggggcaagtgcggttccggtgggagggggtcgagcgcctcggtatcatccgagtccgagaaacgcagggagtctgcgtcggagtgttcatcatcggaggagatgtgcagcgtctgaagcagcgatgcgggtgggggcgcggagtcgacgtgaagcgcgagagaggaagcccacgaagtcacagcggacactgggaggtgggtgtttgtatgtgtgggagactcgggcgtcgggaccgagtctcggctctggggtgtaagcgtccgagttacgggcggcaggggcggctggggcaggggcggctggggcaggggcggctggggcaggggcggctggggcaggggcggctggggcaggggcggctggggcaggggcggctggggcaggggcggctggggcaggggcggctggggcaggggcggctggggcaggggcggctggggcaccgagcgcgcgcggatgcgcgtccgcgcggcgggtttggtcgcgggtgactggggtggggggcggcgggcaaccgggcctccgggcacgacccaaccgcacaaaggctcgctcggggcaaccgggcctggggccaaaggcggggggctggtctggacggcggaggtcgggggggcaaggcccggagaaggcggcactgccgccgctgcggcggaaaccgcggccgcgtggtcggctgggtcccggggagaggggagggagttcaacgaggccgagagcgaggcgaccgcggggcgcgtgaggcgccggggtgggccggccgcggggccccgggggggtgtcggcgagggacccgctgttgtctggcggcggccgcggcggcggtcgcccccggggacgaccgctccttcggcgggcggaggcgggatgggcgcgagcgtgggggcgggaaaggccccgcgagccgaggcggggccgggcggaaggggcaaagcagaaacccaagccgggggcgcggactccggggtgggcggctggtcgggaggacgcgcggaagcggcgaccggggcgaccggggcggggagtgccggcggacgccacccctcggggggggcggaggcccggggcgcgcgcgatttggcacgcgtccggcgggacctgcgcacgcgcggcacggcggcggagaaagcggcggcagagccggaaaaggccgggggaggaagcgcggcatccgcggggggactcggtgtgggtggcgagggccgtgggtcgtcgcgaggggccacgggcacgcgccccgtgttttgttgaggcgggacactcggtcgtgtttcgcgagccgtagctgccggcccgatgggccgcggtgcgtactgggacgtggggacggactgatcggtggcgggggggggaagaagggccggggccggattgggcgtggggccgccggcgtcgtcggacgccagctcctccaggccgtggatccaggcccacatgcgaggggggacgggctcgccggtggtggcgtcggtgaggagagtgggggcgaggacccccgggtccgcctgccgtgcggggggggcagcggggtcctcgggacccgatccgccatccccccccgcaaggtcccgcgggtcgcgggcggcggtcggggcagagggacctgcctcgtcggcgagggggcgctggtaaaccgggtgtcccgggaacagctcccccgtcaggagggaggcgtcgaagggccgcccgaggatggcccgcgcgaagaaggggtccgcgtcggcggcgctcgccgcgagaacgtcccccgcggtagccacaaacggaagctcctcggtggcctcgctgcccacaaaccgcacgtcaggggggccggggggctccggggcttcccacaagaccgcgaccggggtcatggagatgtccacgaggaccaggcacgggggcccgtcggcgagagggcgctcggcgatgagcgccgacaggcgcgggagctgcgccgccagacacgcgttttcgatcgggttgagatcggtgtggaggaggccgacggcccacgtctcgatgtcggacgacacgacgtcgcgcagggcggcgtccggcccgccggggcgcgagtcgaagagcgtcaggcacagttccagttccgactcgcgggagaaggccgtggtgttgcggagcgccaccacgacgggcgcgccgaggagcaccgcggccagaaccaggtccatggccgtaacgcgcgcggcgggggtgcggtgggtcgcggcggccagcacggccacgtgctggcccgtgggtcggtagagggcgtggggggcctcggggagggacgcctcgcgcccccccgccgggccgagcgtctggccagactccaggcgtgcggccaggagggcgtcgaagctgtcgtactcggtgtagtcgtcgggaaacatgcaggtccacagcgcggccaaagcggcgctcggcagacacatgcgcccgaggacgctcaccgccgccagggcctgggccggactgagcttcccgagcgccgggacgtcccggcgctgggtcccgagctccaaggccgagcgccagggcgccagcgggtcggtttcggacagcttgccccggcgccagtcggccagccgcgtgccgaacaggaggccccgggtcggggggcctccgtccaaaaacgtcggcaacacgcggatgcgggcgtcgggatgcggggtcaggcgctggacgaacagcatggactccgctgcgtcctcgaacgcgcgttcgagggtgaggtgcatgtactcgtgctggcgaacgaggtccaggcgccagaagttgtagatgtgttccggaacgccggccaccagcgcgaccagcacgtcgttctcgttgaaggcgacgcagtggcgctgggacccccgggggcccggcggcggacgcggcgccgccgctccggacgcccagcccagctgggcccagcgacacccaaactcgcgcgtgagggtggtggcgacgagggcgacgtacagctcggccgccgcgtccatcgaggcgccccacgtcgcctggcgatggcgcacgaagcgaccgaacagctgaaagttggcggcctgggcgtcgctgagggccagctggagccggttcacgacggtcagcacgtacatggccgtgaccgtcggggccgattcgaggacgtccgtcggaagcgggggccgcacgcaggccgcctcgggacgcatcagcagcgcgccgagtttgtcggtgacggccgggaagcatagcgcgtactgcagcggcgttccgtccggggccaaaaagctggtggcgaacggcagatccagagcgctgacggcctcacgcagcaccaggggccccgggtctccgccggcgcgcagatacgcctcgccccggcggcgcagcagctgcgggtcgacctcgtggccctcgggggaagaagaggcccgggcgcgggcgtcgagggcgcgaagatcaacgagcaggggcgcgggcgcggactccgcgcccgcgcccgtctggccgccggccctggcgtacgcgctatataagcccatgcggtattggatgagttcccgcgcgccccggaactcctccaccgcccacggggccaggtccgcggccgccgcgtcgaactccgccagcaggccccccagggcgtcaaagttcatctcccagggcaccctgcgcaccacctcatcccgcagccgggcgcacagggcggtgtgcttggtgacgcgcgcgcccagctcctccacggcctccgcgcgctcggcgcccttggcgcccaggacgccctggtacctggcggaaaggcgctcgtaggccggctgggcccgcagccccgacaccgtgttggtggtgtcctgcagggcgcgcagctgctcgtgcatggcgcggaacccctcgggggacttccaggcgcccccccggacgcggccaaagcgaccccagacctcgtcccactccgcctcggcctcctccagggacctccgcagggcgtcgacgcggcgccgagtatcaaagagcgcccccaggcggccggcgtgccgcgccagggggccggggccgtcgccgcgggcggcgcttagcgggtgcgtctcgaaggtgcgctgggcgtgctctagccagataaccgcgggcacgtcgagctcgcgcgttttctcggtctgatccaacagaacctcgacctggtcggcgatctccgccaccgagcgcgcctggtcgagcgtcttggccacggtcgccgggacggcgaccaccttcagcatggtcttgaggttggccaggccctcggcctcgatctgggcccggcgctcgcgcgcggccagcgcctcccgcaggcccgccatgacccgctcggtggcctccgcgcgctgctgtttggcgcgcaccactgcgtccttggtctcggccgtgtcctgccgggtcacgaaggcgacatactcggcgtacgccgtgttcttcacggggctctggtccacgcgctccaacgccgccgcgcacgcgaccagcgcgtcctcgctgggacacggcagggtgaccccggtccggaccagctccgcggtggcctccgggtcattccgggccgcggatatctgctccgcggcggccgccaggtccaggggcacgccgccgagcgcccggtgcacgtcggcccggatggcgtccaggcgatcgcggagctccacgtagtcggcgtagccatgttggaagaacggcacgtaccggcgcaggccgggcacgctcgtcatgtcgtccgccaggcgccccacggcctcgtggtagtcgataaacccgtcgcccgcctgggccatttccaggagcccctccgcgatgcgcagcagccgcgccaggggctcggcgtcgacccgaaacatgtcggcgtaggtttcggcggcggcgtggaacgccgcgctccagccgaggcggtggatggcggcgagcggggggagcatggggtggcgctggttctcgggggtgtaggggttaaacgcgaaggccgtatccagggcgagggtgaccgcctcggcgttggccgcgagcgcctgctcggcgcgcttgcggaagtcccgggggttgtagccgtgcgtgcccgccagcgcctgcaggcggcgcagctcgaccacgtcgaactcggcgcggttctcgacgcggtccagcgccgcctcgacgccggcggcccagcgctcgctgctgccccgggcgcgctgggccgccatcttcgccgtcaggtcggcgacggcggcctcaagttcgtcggcgcggcgtcgcgtggcgccgatgaccttgcccagctcctgcagggcgcgcccgctgggggaatggtccccggccgtcccttcggcgtgcagcaggcccccgaacccagcctcgtgccccgcgaggctttcccgagcagcggtcgtcgcgcgggccgcggcatcgatgagggcggcatggtccccctccggctgggcgcaggcccggcgcgcctggactaccaggtcggcggccgccgaccccagggtcgtgagctcgtcgatggccccccgcgcctccagggccagccgagtcgcctttacataccccgcggcgctatcggccagcaccgcgaggaaggacaggggcgaggccgggtcgcgggcggccgcgcccagggccgacaccgcgtccgccagggcgccatgcgcccgcacggccgcgtccaccgtcgccgcgggacttgccgtcgcgacggcggcgctcccggcgttgatggcgtttgacacggctttggcgattgtgggggcgtgatcggaaaagaactgcacgaggaccggcgtctcgggggcgtcggcgaacagggtcttcagcaccaccacgaaggcgggatgcaggccggccagagccgtcgcggtatccggggtcgggtgttccagggcctcccggtactgccccagcagcccccacaggtccgcccgcagcgccgccgtgacttccgggggggggccccggacggcatcggccaggtcggtccaccccgcgggcagggaggcccgcagggtcgccagcacggccggacacgcctttagccccacaaagtccgggaggggccgcaggaccccttggagtttgtgcaggaacttctcccgggcgtcgtgggccaccttggcgcgctcccgcgcgtcgttgagcatcgcctccagggcgtgggcgcgctcccgaagccgggagcgcgcctccggagcgagctccgccgtcatcttggccgcctccatggccctcgcctgccgcagcgcgtcttcggccatgcgcgtggcctcgggggacagcccgcccccgtcgacgtacggcgcggggccggtcgccgggacgaaggccgcgtcgctgtccagctgctgcgcgagcgccgcgtcgagggcgtcgaagcgctgcagttcggccagccccgagctgcgccgcgcctgctggtcgttgatgccgtggatgctgcgcgccagctcttccaggggcttgcgttcgatgagcccctgggtcgcggcgtcggtcaggaccgagagccaggccgccaggtcctcgggggcatctaggggctggccccgctggagcaggtcccgcagcaggatggcctgggggctggtggcgagggggggcgggggggggagcgcggcgcgctgagcgacgtcccgcgtgtgttggtcaaaggccggtagcgattccagcaactggaccatgggcacgaccgcggccgaggccacgtgaaaccgacagtcgtggctgtcgctggcctgcagggccttcgcgctgtatacggctccccggtggaagtactccttgaccgcgctctcgatcgcccggcgggcctggatccgcacgtcctccagccgcgcctggatggcctcggggcccagggcgggcgggcacggggccctgccgccggcgcccggggcggcgggcacgggcatcacggtcaggggcccggcgcgctgcgagaccgagtcgaccccgcgggcgagggcgtctaaggcctcgcgcatctcgcgggcctccgcctcgacccgcatctcttcgccccgggcaaactgggccagcgcctggatccgatggagaagcggctccgggtgcgtcggggtggcgggggcgaacagggtgttcgggtgggcgcgcgagcgctccaggagccactctccgaggcgtgcgtacagattggccggcggggcggcgcgcagctgcagatccaggtccgcgaggtccccgtaaaaggcgtccgtctcccgaataacgtccctggcgaccaggaccagcttagcgagggccaggcgcccgatctgcgaattttcgtccagcacgtgctggatgaggggccggtgggcggccacgtccgccaggctcatgcgcgtggacgccaggaagtccccgacggccgttttgcggggcagcatgcgcagggtgaagtccagcagggccgcggccgggccggccaccccggcctgcgtatgcgtgcgggccccgttctcgatcaaaaaggcgaggacgcgctcaaagaagaagatgacgcagagctccaacagccccgggtgcgccgggtacggcgaccgcagggcgttgatggtgagctgcgaacacgcggccacctcgcgggccagggcggcatcgcgcgccgcgagccggaccgccgtggcggccacattggggtggacctcgaacagctgcgccaggtcggcgccggggggctccggggggcggcgggcccccagcgtctcgagcacggacggcgacgacgggctcgcgggcccgtcgtcgccgccgccctgcccggactgcgggggggtatccggtgcgggagggaccgtggcggctatgggcgtcggggaggaggcggggacctcggcggcgacgggggccttcttcttgggcgcggacttcttcttggccttggcgggcggggccttgggggcgggcctctcgcccgaggtcagatcctccacgctggacggtggggtccaggtgggccggcggcgcttgggcaagccggtagaatagcgcgcccggtggcgacccaccggcactgcccccacctccaggacccgcaggtcctcggcttcttcggccgcgtccccggcgggtgtctgcgggggcggggcggcgtgcggtggacccgaggccgcggcgtccggggccgagggcttcgcgggcggggtcccctccagggctgctgcccacacatcatcgggggggcggtttgggtgccccgcctgcggtgtgtcgggtgggcccgaggccccccggggggcctcggggggccggtcggccccaggggtctggacgtgggtgggcgcggggagcgcggggacgaccgggcccgagccttctccgtcccccctggggaccacaccgacaaagagcgccccgagccccccgatctcgccccgcagggggtgggtgatggccacgcgccgctcgacgaacggttcgtcctgcaggtaagtctcgctggccccgtagaggtgcagggccgcggcggtcaggtccgccggcgccacggcccccgggccggagggcacaaaaaacaccatggcgcccgcccaccgcaccttggggcggtcgtgggcgtaatacgtcaggtacgggtacacgtcgcccgcccgcaccttggcgataaacgcgggcgttcccgcgggcaggccgtgcgggtcaaacagataggccgtgtcgccgtcccggtagagccccatgcccagggggccgatggtcaggagcgtgtaggacagcggccgcatggcccaggggccggcgaagaacgtgtgcgcggggcattgcgtctccagcagccccgccgtgggctccccgaagaagcccacctcgccgtacacccgcgaaaacacgcaacgcaggccgccgcgcgccgccgggtactccaggaagttggggagctcgataatggaacacatgcgcggcggcccggagcccgcggccgcgcgcgtccactcgcccccctccaccagacatccctcgatggcctccgcggacagcacgtcgcggggccccacgtcgaaaagaagactgagaaacgacagggacgagcgcatgcacgataccgacccccccggctccagatcggtcgcgaactggttccgaacaccggtgaccacgatatcgcgatccccctggcgcttcatcgtggggtgaggtagcgcggccggaatcatgtgtgccgcgcccgccacgagcggggcctgtttatgggccgggcgtcccgatgagtactgttgtttccgccgcccgaacccccccgcccatcaaccgcctgttcgtccccctaaccacacacccggtatcgcgtgtgtgtggtttcccgggaagacacatcccaccccatgaagttttgccctttttttccgtcccgcactacgccacctttccacccccccccaaaaaaacaacaaccaactcccagatggatgggtgcgataataaagctttattattgtttaaccaaaggcgagtcctacgggtgtaccggtggtgtctcctgcggcgtcatctcgtcgtcctccacgggggtgttgggccaagggaccgtctcgcggcccgccgggcgcgtcgacggcgcgcgggcctgcgtgtcctgtgggccgggtgtcgtgggttcgggggtgctaccgccggcatcttgggcctccaggtccccgggggcccccgggccggcggaaggccgaaacgccgaggcgcgaaacacgccgtcggtgacctgcaggagctcgtttattaatagccagtccatgctcagcgtagcggccagcccctggggagacaggtccacggagtccggaaccaccgtcggctgacccaggggccccaggctgtagtccccccaggcccccaggtcatgacggttcgtgagcacgacgaggtctgcggccgggctggggggcgcgtcctcggtcgcgtgggccatcacctcctgaatggctgcggtgcgctgatcggccgagctggcgaagcgcgccacgaccagcgcgcgctccgtctgcaggcccttccacgtgtcgtggagttcctgaacgaactcggccacccgctcggggcccgtggccgcgcgtgcggcctgatagccggccgagaggcgccgccagcgcgccaggaactgactcatgtaacagaacccggggacctggtcccccgacatcaactttgacgccctggcgtggatgcccgacacgatggccaggaacccgtggatttcccgccgcacgacggccagcacgttaccctcgtgcgagacctgggccgccagctcgtcgcataccccgaggtgcgccgtcgtctcggtgacgacggaccgcagccccgcgagggacgcgaccagcgcgcgcttggcgtcgtgatacatgccgcagtactggctcaccgcgtcgcccatggcctcggggcgccagggccccaggcgctcgtgggcgtctgcgaccacggcgtacaggcggtgcccgtcgctctcgaaccggcactcaaagaaggcggcgagcgtgcgcatgtgcagccgcagcagcacgatcgcgtcctccagctggcggaccagggggtcggcgcgctcggcgagctcctgcagcaccccccgggccgccagggcgtacatgctgatcagcagcaggctgctgcccacctcgggaggctgggggggaggcagctggaccgcgggccgcagctgctcgacggcccccctggcgatcacgtacagctcgcgcagcagctgctcgatgttgtcggccatctgcatcgtgggcccgacgccggcccgggtggccggttcgaggagggtgatcagcgcgcccaattttgtgcggtgcccctcgacggtggggagatagcccaggccgaagtcgcgcgcccaggccagcacccgcagggcaaactcgatggggcggggcaggtaggcagcgttgcacgtggccctcagcgcgtccccgaccaccagggccagcacgtaagggacgaaccccgggtcggcgaggacgttggggtggatgccctccagggccgggaagcggatcttggtggccgcggccaggtgaaccgagggggcgtggctaggcggcccgacggggagcagcgcggacagcggcgtggccggggtggtgggggtcaggtcccagtgggtctggccgtacacgtcgagccagatgagcgccgtctcgcgcaggaggctgggctggccggcgctgaagcggcgctcggccgtctcaaactcccccacgagcgtgcgccgcaggctcgccaggtgttccgtcggcacggccgggcccatgatgcgcgccagcgtctggctgaggacgccgcccgacaggccgaccgcctcacagagccgcccgtgcgtgtgctcgctggcgccctggatccgccggaacgttttcacgtagccggcgtagtgcccgtactcccgcgcgagcccgaacacgttcgcccccgcaagggcaatgcacccaaagagctgctggatctcgctgagcccgtggccggggggcgtccgcgcgggcacccccgccaccaaaaacccctccagggccgatatgtactgggtgcagtgcgcgggcgtgaaccccgcgtcggtaagcgtgttgatcaccacggagggcgagttgctgttctggaccaaagcccacgtctgctgcagcagcgcgaggagccgttgctgggccccggcggagggcggctcccctagctgcagcaggccggtgacggccggacggaagatggccagcgccgacgcactcagaaacggcacgtcggggtcgaagacggccgcgtccgtccgcacgcgcgccatcagcgtccccgggggcgcgcacgccgaccgcgggctgacgcggcttagggcggtcgacacgcgcacctcctcgcgactgcgaaccattttggtggcctcgaggggcgggatcatgatagccgggtcgatctcccgcaccgtgtgctgaaactgggccagcagcggcggcgggaccaccgcgccccgatcgggggtcgtcaggtagtcgtccaccagcgccagcgtaaacagggcccgcgtgaggggggtcagggcggcgtcgtcgatgcgctgtaggtgcgccgagaacagcgtcacccaattgctgaccagggccaagaaccggagaccctcttgcacgatcggggacgggaagagcaggctgtacgccggggtggtcaggttggcgccgggttgccccaggggaaccggggacatcttaagcgacatctccccgagggcctccagggaggtccgcgggttcatggccaggcagctctgggtgacggtccgccagcggtcgatccactccacggcacactggcggacgcgcaccggccccagggccgccgtggtgcgcagcccggcggcctccagcgcgtgggtcgtgtcggagccggtgatcgccaggaccgtgtccttgatgacgtccatctcccggaaggccgcctcgggggtctcggggagcgccaccgccatgcggtgcaccagcagcccggggaggttctcggccaagagcgccgtctccggaagcccgtgggcccggtgcaaggcgcacagttgctccaggagcgggtgccagcacgcccgcgcctccgccgggccgaccgccgcgcccgacaacagaaacgccgccgtggcggcgtgcagtttggccgcggacagaaacgccggctcgtccgcgctgcccgccggctcgctcgagggggagggcggccggcggaggttggtcaggctccccaacaggacctgcaacggtccgtttgggggtggagcggacgggggggtcatgccggcgggcgccgggacctggagcgcgctgtccgacatggcgaccggcgtgcgcgctcggcgacgcggcgcggagaccgcgggcccaaacgggaatgactgccgccgccctatacggaggggctaagtatcgcccggggacccttcgaaaccccgggcgtgtcgcaagtacgccgcgaaggcgcggcgtgttatacggcgcgttatgtcccggcattccgttcgtgggttcgggcccgggtgctgtcgggtgggagtgtgtgtgggggggggcggcgcgacggcggcccggaccaagtgtatcgcggccgttccgtggggcggcccaacaggccctttaaacatttgcgtatgcaccggcccagccagtcggacaccggaacccaccagaggcggaagccgccttcgcccgtgagggtgcgtgtgttttctggtggcgtgtttttcctttccgccctcctccctccccacctccaccacccccccccacaactcgcccgttggcgatcggcgggaaaaccatgaaaaccaagccactcccgacagccccgatggcgtgggccgagagtgccgtggaaaccaccaccagcccgcgcgagctcgcgggccacgccccgctccggcgcgtcctgcgcccgcccatcgctcgccgcgacggcccggtgcttttgggggacagggcccccaggaggacggccagtacgatgtggctgctggggatcgaccccgcggagtcgtctccgggaacgcgcgctacccgagacgataccgagcaggccgtggacaagatcctcaggggagcccggcgcgcgggagggctgaccgtccccggcgccccccgctatcacctgacccgccaggtaaccctgacggatctctgccaaccaaacgcggagccggccggggcgctccttttggccctgcggcaccccaccgacctcccccacctggcccgccatcgggctccgcccggccggcagaccgagcgactggccgaggcctggggccagctcctggaggcctccgccctggggtccgggcgggccgagagcggctgcgcgcgcgcgggccttgtgtcgtttaactttctggtggccgcgtgcgccgccgcctacgatgcgcgcgacgccgccgaggcggtccgggcccacatcacgaccaactacggcgggacgcgggccggggcgcggctggaccggttttccgaatgcctgcgcgccatggtccacacgcacgtgtttccccacgaggtcatgcggtttttcggggggctagtgtcgtgggtcacacaggacgagctggctagcgtcaccgccgtctgcagcggaccccaggaggccacacacaccggccacccgggcaggccccgttcggccgttaccatcccggcctgcgccttcgtggacctggacgccgagctgtgcctggggggcccctggggggcgttcctgtacttggtcttcacctaccgacagtgccgggaccaagagctctgttgcgtgtacgtggtcaagagccagctccccccgcgcggactggaggcggccctcgagcggctgttcgggcgcctccggataaccaacacgattcacggggccgaggacatgacgccccctcccccgaaccgaaacgttgactttccgctcgccgtcccggccgcgagctcgcaatccccgcggtgctcggcgagccaagtcacgaacccccagtttgtcgacaggctgtaccgctggcagccggatctgcgggggcgccctaccgcacgcacctgcacatacgccgccttcgcagagctgggtgtcatgccagacgacagcccccgctgtctgcaccgcaccgagcggtttggggcggtcggcgttccggttgtcatcctggagggcgtggtgtggcgcgcggcggggtggcgggcctgcgcgtgatcgtctattgacgacggccgcccaacccgagcgaccttcccctcccacttccccccccctacacaccaactccgccctcgccgtcttggccgtgcgcggccccgtgcgtccgtctcaataaagccaggttaaatccgtgacgtggtgtgtttggcgtgtgtctctgaaatggcggaaaccgacatgcaaatgggattcatggacatgttacacccccctgactcaggagataggcatatcctccttagattgactcagcacacgatcgcaccccacccctgtgtgccggggataaaagccaacgcgggcggtctgggttaccacaacaggtgggtgcttcggggacttgacggtcgccactctcctgcgagccctcacgtcttcgcccaccgattcctgttgcgttcctgtcggccggtgctgtcctgtcgacagattgttggcgactgcccgggtgattcgtcggccggtgcgtcctttcggtcgtaccgcccaccccgcctcccacgggcccgccgctgtttccgttcatcgcgtctattaattaaagatctaaataacttcgtatagcatacattatacgaagttatccatgccggtcatggctgcgccccgacacccgccaacacccgctgacgcgccctgacgggcttgtctgctcccggcatccgcttacagacaagctgtgaccgtctccgggagctgcatgtgtcagaggttttcaccgtcatcaccgaaacgcgcgaggcagccggatcataatcagccataccacatttgtagaggttttacttgctttaaaaaacctccccacctccccctgaacctgaaacataaaatgaatgcaattgttgttgttaacttgtttattgcagcttataatggttacaaataaagcaatagcatcacaaatttcacaaataaagcatttttttcactgcattctagttgtggtttgtccaaactcatcaatgtatcttatcatgtctggatccggcctggccgctttacttgtacagctcgtccatgccgagagtgatcccggcggcggtcacgaactccagcaggaccatgtgatcgcgcttctcgttggggtctttgctcagggcggactgggtgctcaggtagtggttgtcgggcagcagcacggggccgtcgccgatgggggtgttctgctggtagtggtcggcgagctgcacgctgccgtcctcgatgttgtggcggatcttgaagttcaccttgatgccgttcttctgcttgtcggccatgatatagacgttgtggctgttgtagttgtactccagcttgtgccccaggatgttgccgtcctccttgaagtcgatgcccttcagctcgatgcggttcaccagggtgtcgccctcgaacttcacctcggcgcgggtcttgtagttgccgtcgtccttgaagaagatggtgcgctcctggacgtagccttcgggcatggcggacttgaagaagtcgtgctgcttcatgtggtcggggtagcggctgaagcactgcacgccgtaggtcagggtggtcacgagggtgggccagggcacgggcagcttgccggtggtgcagatgaacttcagggtcagcttgccgtaggtggcatcgccctcgccctcgccggacacgctgaacttgtggccgtttacgtcgccgtccagctcgaccaggatgggcaccaccccggtgaacagctcctcgcccttgctcaccatggtggcgaccggtggatcccgggcccgcggtaccgtcgactgcagaattcgaagcttaagtttaaacgctagcatggtgcaggtcgaaaggcccggagatgaggaagaggagaacagcgcggcagacgtgcgcttttgaagcgtgcagaatgccgggcctccggaggaccttcgggcgcccgccccgcccctgagcccgcccctgagcccgcccccggacccaccccttcccagcctctgagcccagaaagcgaaggagccaaagctgctattggccgctgccccaaaggcctacccgcttccattgctcagcggtgctgtccatctgcacgagactagtgagacgtgctacttccatttgtcacgtcctgcacgacgcgagctgcggggcgggggggaacttcctgactaggggaggagtagaaggtggcgcgaaggggccaccaaagaacggagccggttggcgcctaccggtggatgtggaatgtgtgcgaggccagaggccacttgtgtagcgccaagtgcccagcggggccgctaaagcgcatgctccagactgccttgggaaaagcgcctcccctacccggtaggaattgatccggcagtctagtcaataatcaatgtcaacgcgctggttctttccgcctcagaagccatagagcccaccgcatccccagcatgcctgctattgtcttcccaatcctcccccttgctgtcctgccccaccccaccccccagaatagaatgacacctactcagacaatgcgatgcaatttcctcattttattaggaaaggacagtgggagtggcaccttccagggtcaaggaaggcacgggggaggggcaaacaacagatggctggcaactagaaggcacagtcgaggctgatcagcgggtttaaacgggccctcagtcgactccagcaaatctaatgttgatggtgtatcccccgtcctccaggtcggcggtatacttgccatgctctttgctcagcaggtcggcatatctgtaagcctcggcggttgcttcagcaaaagttcccttgaaagtagctgtctgcacggtcccatcctcaaagtagatgttttccttgatggtgacctgctccttctcttcaggtttttcgtccactttcttcccggcgaatctaatattgattgtatacccgccatcctccaggtcagcagtgtacttgccgttctcctttgccagcagatcagcataccggtaggcctctgctgtagcttcggcaaaggtgcccttgaactcggcggtctgagtctttccgtcagcgtagatcaggttggccttgattgtcacctcttctttgggctcttctggggttttctccttcccggcaaacttgatattcagagtatagcctttatctgccacgtccactgtgtacttgccgttttctttggccagcagatctgcatagcggtatgcctcagcagtggcctcttcaaatgttcccttgaattcggctgtctgggttttcccgtctgcgtagatcagattagccttgatggtcacttcctctttaggctcttcgggagttttctccttgccagcgaacttaatattcagtgtgtatcccttatcggccacgtccacggtgtactccccattgtctttcttcagtgcgtcagcatatctgtaggcctctgcggtagcctcttcaaaagtccccttgaattcggcagtctgtgttttgccatcggcgtagatcaggtttgccttgatagtgacctcttcttttggctcttcaggtgttttttcctttcctgcaaacttgatattcagggtataccctttatcagccacgtccacagtgtactcgccgttatctttcttcagtgtgtcggcatatgcgtaagcctcgcttgtggccttttcaaaggtgcctttgaactctgcggtctgagttgatccattagcgaaaatcaggttggccttgatggtcacctcttcctcagagtcagtctcgggtgtttctggggtttcctccttattctcgactgtacaggcataatctggcacgtcataagggtaggatccgggacaaggggggcatgtgtgggtcttatcgcaagattttggctcgagcttaggggcctgtgcgtcattcagtttcttagcctctgccagcaggttggcggactggcttggatcgtcgtacagggatcggatgaaagcccttttctgctgattattcaggttaggcagcagtgcgatttcccagtaagcgtttctcatctccttgttgaacttgttgtccaccaattcggcccacaccatgggccagaggagcagaagaagcagcaggagccaccacagcctccaccacatggtggcggcggatccgccggtgctgagtccggtagcgctagcagctggtacccagcttggaggtgcacaccaatgtggtgaatggtcaaatggcgtttattgtatcgagctaggcacttaaatacaattatctctgcaatgcggaattcagtggttcgtccaatccatgtcagacctgtctgttgccttcctaataaggcacgatcgtaccaccttacttccaccaatcggcatgcacggtgctttttctctccttgtaaggcatgttgctaactcatcgttaccatgttgcaagactacaagtgtattgcataagactacatttccccctccctatgcaaaagcgaaactactatatcctgaggggactcctaaccgcgtacaaccgaagccccgctgggcgcctaaacacaccctagtcccctcagatacgcgtatatctggcccgtacatcgcgaagcagcgcaaaacgcctaaccctaagcagattcttcatgcaattgtcggtcaagccttgccttgttgtagcttaaattttgctcgcgcactactcagcgacctccaacacacaagcagggagcagatactggcttaactatgcggcagcagagcagattgtactgagagtgcaccatacaagctcaggatctgcgatgataagctgtcaaacatgagaattggtcgacgcgttgacattgattattgactagttattaatagtaatcaattacggggtcattagttcatagcccatatatggagttccgcgttacataacttacggtaaatggcccgcctggctgaccgcccaacgacccccgcccattgacgtcaataatgacgtatgttcccatagtaacgccaatagggactttccattgacgtcaatgggtggactatttacggtaaactgcccacttggcagtacatcaagtgtatcatatgccaagtacgccccctattgacgtcaatgacggtaaatggcccgcctggcattatgcccagtacatgaccttatgggactttcctacttggcagtacatctacgtattagtcatcgctattaccatggtgatgcggttttggcagtacatcaatgggcgtggatagcggtttgactcacggggatttccaagtctccaccccattgacgtcaatgggagtttgttttggcaccaaaatcaacgggactttccaaaatgtcgtaacaactccgccccattgacgcaaatgggcggtaggcgtgtacggtgggaggtctatataagcagagctctctggctaactagagaacccactgcttactggcttatcgaaattaatacgactcactatagggagacccaagctggctagcgtttaaacttaagcttcgaattctgcagtcgacggtaccggatccatgagcggccgcttaattaaccacacgccctatcatctgagggagtatgcgacgcggctggttaacgggttcaaacccctggtgcggcggtccgcccgcctgtatcgcatcctgggggttctggtccacctgcgcatccgtacccgggaggcctcctttgaggaatggatgcgctccaaggaggtggacctggacttcgggctgacggaaaggcttcgcgaacacgaggcccagctaatgatcctggcccaggccctgaacccctacgactgtctgatccacagcaccccgaacacgctcgtcgagcgggggctgcagtcggcgctgaagtacgaagagttttacctcaagcgcttcggcgggcactacatggagtccgtcttccagatgtacacccgcatcgccgggtttctggcgtgccgggcgacccgcggcatgcgccacatcgccctggggcgacaggggtcgtggtgggaaatgttcaagttctttttccaccgcctctacgaccaccagatcgtgccgtccacccccgccatgctgaacctcggaacccgcaactactacacgtccagctgctacctggtaaacccccaggccaccactaaccaggccaccctccgggccatcaccggcaacgtgagcgccatcctcgcccgcaacgggggcatcgggctgtgcatgcaggcgttcaacgacgccagccccggcaccgccagcatcatgccggccctgaaggtcctcgactccctggtggcggcgcacaacaaacagagcacgcgccccaccggggcgtgcgtgtacctggaaccctggcacagcgacgttcgggccgtgctcagaatgaagggcgtcctcgccggcgaggaggcccagcgctgcgacaacatcttcagcgccctctggatgccggacctgttcttcaagcgcctgatccgccacctcgacggcgagaaaaacgtcacctggtccctgttcgaccgggacaccagcatgtcgctcgccgactttcacggcgaggagttcgagaagctgtacgagcacctcgaggccatggggttcggcgaaacgatccccatccaggacctggcgtacgccatcgtgcgcagcgcggccaccaccggaagccccttcatcatgtttaaggacgcggtaaaccgccactacatctacgacacgcaaggggcggccatcgccggctccaacctctgcaccgagatcgtccacccggcctccaagcgatccagtggggtctgcaacctgggaagcgtgaatctggcccgatgcgtctccaggcagacgtttgactttgggcggctccgcgacgccgtgcaggcgtgcgtgctgatggtgaacatcatgatcgacagcacgctacaacccacgccccagtgcacccgcggcaacgacaacctgcggtccatgggcattggcatgcagggcctgcacacggcgtgcctcaagatgggcctggatctggagtcggccgagttccgggacctgaacacacacatcgccgaggtgatgctgctcgcggccatgaagaccagtaacgcgctgtgcgttcgcggggcgcgtcccttcagccactttaagcgcagcatgtaccgggccggccgctttcactgggagcgcttttcgaacgccagcccgcggtacgagggcgagtgggagatgctacgccagagcatgatgaaacacggcctgcgcaacagccagttcatcgcgctcatgcccaccgccgcctcggcccagatctcggacgtcagcgagggctttgcccccctgttcaccaacctgttcagcaaggtgaccagggacggcgagacgctgcgccccaacacgctcttgctgaaggaactcgagcgcacgttcggcgggaagcggctcctggacgcgatggacgggctcgaggccaagcagtggtctgtggcccaggccctgccttgcctggaccccgcccaccccctccggcggttcaagacggccttcgactacgaccaggaactgctgatcgacctgtgtgcagaccgcgccccctatgttgatcacagccaatccatgactctgtatgtcacagagaaggcggacgggacgctccccgcctccaccctggtccgccttctcgtccacgcatataagcgcggcctgaagacggggatgtactactgcaaggttcgcaaggcgaccaacagcggggtgttcgccggcgacgacaacatcgtctgcacaagctgcgcgctgtaagcaacagcgctccgatcggggtcaggcgtcgctctcggtcccgcatatcgccatggatcccgccgtctcccccgcgagcaccgaccccctagatacccacgcgtcgggggccggggcggccccgattccggtgtgccccacccccgagcggtacttctacacctcccagtgccccgacatcaaccaccttcgctccctcagcatcctgaaccgctggctggagaccgagctcgtgttcgtgggggacgaggaggacgtctccaagctctccgagggcgagctcggcttctaccgctttctgtttgccttcctgtcggccgcggacgacctggtgacggaaaacctgggcggcctctccggcctcttcgaacagaaggacattcttcactactacgtggagcaggaatgcatcgaggtcgtccactcgcgcgtctacaacatcatccagctggtgctctttcacaacaacgaccaggcgcgccgcgcctatgtggcccgcaccatcaaccacccggccattcgcgtcaaggtggactggctggaggcgcgggtgcgggaatgcgactcgatcccggagaagttcatcctcatgatcctcatcgagggcgtcttttttgccgcctcgttcgccgccatcgcgtacctgcgcaccaacaacctcctgcgggtcacctgccagtcgaacgacctcatcagccgcgacgaggccgtgcatacgacagcctcgtgctacatctacaacaactacctcgggggccacgccaagcccgaggcggcgcgcgtgtaccggctgtttcgggaggcggtggatatcgagatcgggttcatccgatcccaggccccgacggacagctctatcctgagtccgggggccctggcggccatcgagaactacgtgcgattcagcgcggatcgcctgctgggcctgatccatatgcagcccctgtattccgcccccgcccccgacgccagctttcccctcagcctcatgtccaccgacaaacacaccaacttcttcgagtgccgcagcacctcgtacgccggggccgtcgtcaacgatctgtgagggtctgggcgcccttgtagcgatgtctaaccgaaataaaggggtcgaaacggactgttgggtctccggtgtgattattacgcaggggaggggggtggcggctggggaaagggaaggaacgcccgaaaccagagaaaaggaccaaaagggaaacgcgtccaaccgataaatcaagcgccgaccagaaccccgagatgcataataacgattttattactcttattattaacaggtcgggcatcgggaggggatgggggcgcgcgtttcctccgttccggctactcgtcccagaatttagccaggacgtccttgtaaaacgcgggcgggggcgcgtgggcccacagctgcgccagaaaccggtcggcgatgtccggggcggtgatatgccgagtcacgatggagcgcgctaaatcttcgtcgcggaggtcctgatagatgggcagtctttttagaagagtccagggtccccgctccttggggctgataagcgatatgacgtacttgacgtatctgtgctccaccagctcggcgatggtcatcggatcgggcagccagtccagggcctccggggcgtcgtggatgacgtggcggcgacgtccggcgacatagccgcggtgttccgcgacccgctgcgcgttggggacctgcacgagctcgggcggggtgagtatctccgaggaggacgaccgggcgccgtcgcgcggcccaccggcgacgtccgggggctggaggggggggtcttcttcgtagtcgtcctcgcccgcgatctgttgggccagaatttcggtccacgagatgcgcgtctcgaggccgaccggggccgcggtcagcgtaggcatgctctccagggagcgcgagttggcgcgctcccgccgggccgcccggcgggcctgggatcggctcggggcggtccagtgacactcgcgcagcacgtcctcgacggacgcgtaggtgttattggggtgcaggtctgtgtggcagcggacgaacagcgccaggaactgcgggtaactcatcttgaagtactgcagcaggtcgcggcagtgaatcgtcggaatgtagccggtgctgatgtccaacacgatatcgcagcccatcagcaggagatcggtatccgtggtatgcacgtacgcgaccgtgttggtatgatagaggttcgcgcaggcgtcgtcggcctccagctgacccgagttgatgtaggcgtaccccagcgcccgcagaacgcggatacagaacaggtgagccaggcgcagggccggcttcgagggcgcgcccgagggggccgccgggcctgggccggcggcccgcgttccccggtcccccggggcgaaggcgtgcccgcggcggcgcatgttggaaaaggcgaaactgggcctggagtcggtgatgggggaaggcggcggcgaggcgtctacgtcactggcctcctcgtccgtgcggcactgggccgtcgtgcgggccaggatcgccttggccccgaacacaaccggctcggtacactcgaccccgcgatcggtcacgaagatggggaacagggacttttgggtaaacacccgtaacatactacagagacagtgtagcgtgattgcctcgcggtcgtaacttgggtagcggcgctgatatttaaccaccagggtatacatgacattccacaggtccacggcgatgggggtaaagtagccctccggggcccggaggccccggcgcttcaccagatggtgagtctgggcaaacttcatcatgccaaacagacccattccggcacgattgtaggtgcggataggtctctctacagagctgtataggtgtgacggtccgggacacccaagcccgccgcccctgtgtacagtggctgcggcgacgaccccgctccaacaagacgctatcccgggaaaggcacgctctttataattcttttttatttcccatctacgtgcggattggtgcaaccgccggcgcgcgccggtgcaggccgaccatctctctcttccccccctccccctcccccgagccctcaaagagggtgtggcctaactagcggaaggcgtatttaaccagactagggcggcgggtccgccgtagtccttggctcgggtagccactgctctgtggctcgggtcccccggcccccctaacccccatccggtccgcgtcatccgccccctccgcctgcgacacaaacggccgcgcctccgggcccggtgacacgacgcgcctcgtctctgcggattgtcccgggagcgtcgcggcatggctcatcttcccggcggtgcggccgccgcccccctttcggaggacgcgatcccgtcgccgcgcgagcggacggaagactggccgccctgccagatagtgctgcagggcgccgagctgaacgggatcctgcaggcctttgcgccgcttcgcacgagccttttggactcgctcctggtcgtgggcgaccgaggcatccttgtacataacgcgattttcggcgagcaggtgtttctgcccctcgaccattcgcagttcagtcgctatcgatggggcggacccaccgcggcgttcctgtctctcgtggaccagaagcgatccctgctgagcgtgtttcgcgccaaccagtaccctgacctgcggcgggtggagctgacggtcacgggccaggccccgtttcgcacgctggtgcagcgcatatggacgaccgcgtccgacggagaggccgtggagcttgccagcgagacgctcatgaaacgcgagttgacgagcttcgcggtactactcccccagggcgaccccgacgtccagctgcgcctcacgaagccccagctcacgaaggtggtgaacgccgtcggggacgagaccgccaaacccaccacgttcgagctcggccccaacggcaagttttccgtgtttaacgcgcgcacctgcgtcacctttgccgcccgcgaggagggcgcgtcgtccagcaccagcgcccaggtccagattctgaccagcgcgctgaagaaggcgggccaagcggccgccaacgccaagacggtctacggggaaaacacacaccgcacattctcggtggtcgtcgacgactgcagcatgcgggcggtcctccggcggctccaggtcggcggggggaccctcaagttcttcctcacggccgacgtccccagcgtgtgtgtcaccgccaccggccccaacgcggtgtcggcggtgtttcttttaaaaccccagcgggtctgcctgaactggctcggccggagcccgggttcctcgaccgggagcttggcgtcccaggactctcgggccggcccgaccgacagccaggactcctcctccgagccggacgcgggcgaccgcggcgccccagaagaagaaggcctcgagggccaggcccgggtaccgcccgcgttcccggaaccgccgggaaccaagcggaggcaccccggggccgaagttgtccccgcggacgacgccaccaagcgcccgaagacgggcgtgcccgccgcccccacgcgagccgagtcgccccccctctccgcgagatacggacccgaggcggcggagggtggtggggacggcggccgctacgcgtgctactttcgcgacctccagaccggcgacgcgagccccagccccctctccgccttccggggtccccaaagacccccatacggctttgggttgccctgacggcaacgggtggtggccgaacgcctcaccgcgcccgggcacgcggggtgcgttgtgttaaaaaaataaataaatggggtagtgtgtcccccccccctccaaccaatatggctgtcgtgtgtggttccgggttgcgcctccgtcctttccaccccccttccccctccttttttgttttgcgtgcgcttataagagcgggcccggggcccttcgcagcttcaccgagagcgccgtcgggccccgggtgcgggatgtgtcgcggggacagccccggggtcgcgggcgggagcggcgaacactgcctcggaggggatgatggggacgacgggcgcccccgcctcgcctgcgtgggtgccatcgctcgggggttcgcgcatctctggctccaggccgccacgctgggcttcgtggggtctgtcgttctgtcgcgcggcccgtatgcggacgccatgtcgggggcgttcgtgatcgggagcaccggcctggggttcctccgcgccccccccgcgttcgcccggccgccgacgcgtgtgtgcgcgtggctgaggctggtcggcgggggagcggccgtggccctgtggagcctcggggaggccggcgcgcctccgggggttccgggcccggcgacccagtgcctggcgctcggggccgcctacgcggcgctgctggtgctggccgacgacgtccatccccttttcctcctcgccccgcggcccctgtttgtcggcaccctgggggttgtcgtcggcgggctgacgataggcggcagtgcgcgctactggtggatcgacccccgcgccgccgcggccctgacggcggcggtggtggcgggcctcgggacaaccgccgccggggacagcttttccaaggcctgtccccgccaccgccgcttttgcgtcgtctccgcggtcgagtctcccccgccccgatacgccccggaggacgccgagcggccaacagaccacggacccctgttaccgtcgacgcaccaccagcgatctccgcgggtctgcggcgacggggccgcacggcccgaaaacatctgggttcccgtggtgacctttgcgggcgcgctcgcgctggccgcctgcgccgcgcgagggtctgacgcggctccgtcaggcccggtcctgccgctgtggccccaggtgtttgtcgggggccacgcggcggcgggcctgacggagctgtgtcagaccctcgcgccccgggacctcacggacccgctgctgtttgcgtacgtcggattccaggtcgtgaaccacgggctgatgtttgtggtccccgacatcgccgtatacgcgatgctggggggcgccgtgtggatctcgctgacgcaggtgcttgggctccggcgccgccttcacaaggacccagacgccgggccctgggcggccgcgaccctgcggggcctctttttctccgtctacgcattggggtttgcggcgggggtgctggtgcggccgcggatggcggcgagccggcggtcggggtgatcgccatttcaaataaaaggcacgagttccccgaataccaccggcgtgtgatgatttcgccctaccgctccgatccccggggggaggggggaaggaaatgggggcgggggtgccgtggacgggtataaaggccaggggggcaggcgggcccatcactgttagggtgttaggttgggaggtggcacaaaaagcgacactcccgtgttgtagttgtccgcgggaggcggtggtttccggcaaccctcctcgctgcgccgggcgcgcccaccggtccttcgcgggggccggggctcttctggtcatggcccttggacgggtgggcctagccgtgggcctgtggggcctgctgtgggtgggtgtggtcgtggtgctggccaatgcctcccccggacgcacgataacggtgggcccgcgggggaacgcgagcaatgccgccccctccgcgtccccgcggaacgcatccgccccccgaaccacacccacgcccccccaaccccgcaaggcgacgaaaagtaaggcctccaccgccaaaccggccccgccccccaagaccgggcccccgaagacatcctcggagcccgtgcgatgcaaccgccacgacccgctggcccggtacggctcgcgggtgcaaatccgatgccggtttcccaactccacccgcacggagttccgcctccagatctggcgttatgccacggcgacggacgccgagatcggaacggcgcctagcttagaggaggtgatggtaaacgtgtcggccccgcccgggggccaactggtgtatgacagcgcccccaaccgaacggacccgcacgtgatctgggcggagggcgccggcccgggcgccagcccgcggctgtactcggtcgtcgggccgctgggtcggcagcggctcatcatcgaagagctgaccctggagacccagggcatgtactactgggtgtggggccggacggaccgcccgtccgcgtacgggacctgggtgcgcgttcgcgtgttccgccctccgtcgctgaccatccacccccacgcggtgctggagggccagccgtttaaggcgacgtgcacggccgccacctactacccgggcaaccgcgcggagttcgtctggttcgaggacggtcgccgggtgttcgatccggcccagatacacacgcagacgcaggagaaccccgacggcttttccaccgtctccaccgtgacctccgcggccgtcggcggccagggccccccgcgcaccttcacctgccagctgacgtggcaccgcgactccgtgtcgttctctcggcgcaacgccagcggcacggcatcggtgctgccgcggccaaccatcaccatggagtttacgggcgaccatgcggtctgcacggccggctgtgtgcccgagggggtgacgtttgcctggttcctgggggacgactcctcgccggcggagaaggtggccgtcgcgtcccagacatcgtgcgggcgccccggcaccgccacgatccgctccaccctgccggtctcgtacgagcagaccgagtacatctgccggctggcgggatacccggacggaattccggtcctagagcaccacggcagccaccagcccccgccgcgggaccccaccgagcggcaggtgatccgggcggtggagggggcggggatcggagtggctgtccttgtcgcggtggttctggccgggaccgcggtagtgtacctcacccacgcctcctcggtgcgctatcgtcggctgcggtaactccggggccgggcccggccgccggttgtcttcttttccaccccttccgtcccccgtacccaccacaccccaccccacccccccgccgtcccccgggcgttataagccgccgcactcgcttttcccaccggaaaatcctcggcccgatccgaacggcgcacgccgcgtgggctccaaacgcctccggaagagagcgccccgccccgatattcaagcccgcggtggtgctatggctttccgtgcttcgggacccgcctaccagcccctcgcccccgcggcctccccggcgcgggctcgtgttccggccgtggcctggatcggcgtcggagcgatcgtcggggcctttgcgctcgtcgccgcgttggttctcgtaccccctcggtcctcgtggggactctcgccgtgcgacagcggctggcaggaattcaacgcgggatgcgtcgcgtgggaccccacccccgtcgagcacgagcaggcggtcggcggctgcagcgcgccggccacccttatcccccgtgcggccgccaagcacctggccgctctgacacgcgtccaggcggagagatcgtcgggttactggtgggtgaacggagacggcatccggacctgtctgagactcgtcgacagcgtcagtggcatcgacgagtttttcgaggagctcgcgatccgcatatgctactacccacgaagccccggcgggtttgtccgcttcgtaacttcgatacgtaacgccctggggttgccgtgaggcgcgcgtccgacggtcccgcttctcgcctctcttcttcccccaccccacccaccgaccaacgacggcgtttggccaataccctccttttttctttttctcttcccccccccccaaaaaaaacaataaacagctaattgcgtacgacaaaccatgcggaactcgctgttttttttctctgtttgttactttttattgaaacagacatacggggaaaggggccggaaaccgagacggtggggccggcggtcgcatttttttaatggctctggtgtcggccgcgtttgagcttcgtcaacagggcgctgagggcggcgacgttcgtcgggccgtcgttggccagcgcgttggtccgggggcgggcgggcatgggcgacaggcttagtcccgggtccggggcgcgtgtggcccgccgaggggagaagagggcagacccgccccagtcgtacaggggattttccgcctcgatgtacggggagtccggggcgtctcccggcagggcggccccgccggcaagacgccggcgagggcagatgttttcgtatacccgaacccaggggatctcctcgtagacgcgccccccatcctcgcccaccgactcgtaaatggaatctgcgtcctcggagggggcgcggggggcgtggctttcggccggccaggcggcggcggcggtggtgtcggcggcgggggtggcgccaagcccgacgcccgcgggcatggcggcgtcatcgtcgggcagcagatacgtgttttccatctggtccggttcggcctccgcgtccggcccccaggtccgcaccgcgtcgtagaccccggcggcctcgcgctgagccgcgagcgggcgcgccgcggctgccggccgctgctcggggggcgcggggttgcggggcgggaggcgcgggggcgccccggccatatgcgtgtaatacgtggccggccggccggcgcagggctcgggaccccggtcggccgcgtcgacgtgcgggggctcggggaggtcctcgcggtggcgcctgcacctccgaggggccgcgggggtcgagtgggggcgagcccgggggagcggcgggggtgcgttgtcgcgccgggtccgttgtatcttgtcccggcagctcccgccgaccgcgccgcggccccccggtgggccggacgccgcgaggcgcaggatggactcgtagtggggcgacggggttccgctccgaagcaggtccggggccagggcggccccgaaccaggacttgatgctgagttccatccgggcccagctcggggcggtcatcgtggggaacaggggggcggcggtcctgcagaagcgctcctggctgtccaccgccgccgtaaggtactcgttgttcaggctgtcggaggcccagacgacatacccggtaagcgtcgcgttaattatatactgggcgtggtggtggactatggatagaacctcgacggtcgagacgatggcgtccacgatcccgtacgtgccgccgctgcgcttgccggtctcccacaggtgggccaggcgcgtcaggtggcccaggacgtcgctgaccgccgcccgcagggccatgcactgcatcgagcccgtggtgccgctgggcccgcggtccaggtggcgcgcaaacgtctccgcgggcgcctccagactcccgctgagcgccacgaaccggcgatcggcggggcccaggcggcgacacacgtacttgtccgccgtccacagcatccacgaggcccaatggtacaacacggagacgtaggccaggagctcgctcagccgcagtgcggtgtccgtgctcggccggctcgggtctgcggggcgcataaagaacatgtactgctggagcctgtgggccgcgtcgcgcaaccccgccaccgcggcggcgtacttggccgcggcggccccgctcttgaacggggcgcgcaccagcagcttcgggagcagggtgggccgcagcagcacgtgcaggctggggtcgcagtcgcccgccgggtcgtcggggatgtccaggccgctgggcacgaccgtctggaggtacttccagtactgcgctaggatggcgcggctcagctggccgcccgacagctccacctcgccgagcgcctgcttggcggccgacgcgtagtgccggatgtagtcgtagtgcgggtcgctggcgagcccgtctacgatcaggctctcggggacggtgttatggtgccgcgccgccagccggacgctgcgatcggcgccggtcagaaacgccggctgcaggtcgtcggcgcgctgccgcaggacgcccacggccgcgctgaggagcccctccggggtggggagcagacacccggcgaagatgcgccgctcggggacgcccgcgttggcgccgcggatgaggttggccggcgtcaggcaccgcgccagccgcagggagctcgcgccgcgcgcccggcgttgcatggcggagaccgttcggtcgggggccccgccggtcggaggtatgccgcgtcccgggatatagggttgctttttatggggaggcgcctatgggcgtggcgggccgcccagcccggtcgcgcgcctcccggacacgtgcgcccggagggcggcggtctcctcgtcgcccatgagcagtttccgaaactgcgccatgatgtccacgacgcggacccgcggccccagcacggactcgctattcaggggggcgggggggaaggccgccaggtcttcgagcaggaaggcggggtctgccgtcccgctcacgggcgcccggggcgccgaggacgcggggcgaaggtccacgtgttccgcggcggcgcgcacgtccgcccaaaatttggcgggggtggtccgcgcgtacaggggctgggtcgcgcggaggacgcacgcgtagcgcaggggggtgtacgtgcccacctcgggggccgtcgacccgccgtcaaacgcggccagggccacgcacgcgaccaccgtgtcggccaggcccagcagccgctgcaggatgagccccgtcgccagcacggcgcgcgcggccgccgcgtcgtccctgcgccggcgcgcgtccccgcaggccagggcgtatttcagggtaacggtcgccagggccgtgtgcagcgcgtacacggccgcgcccagcacggcgttcagcccgctggtggcgagcaggcggcgcgccgcggtgtcgcccagcgcctcgtgctcggccgccacgaccccggggctgcccaggggcagggcgcgaaacagcgcctcctgctccacgtccgcaaacgcggggtgggcggagtgcgggtgcaggcgcgcccccacgaccaccgagagccactggaccgtctgctccgccaggaccgccagcacgtccaggacgcgccccgcaaacgcggcctcccgcgggagcacgcatttgacggcgccggggttgaagcgggcgagcagagccccggtggcgatgtacgtcatgcgccccgcgtagcgggcggccacgcgacagtcgcgccccaggagcgcgcgcaccccgggccagtacagcagggaccccagcgaactgcgaaagaccgcggcgtcggggccggggtgggggggcgcggcccctcccgcgctgagcagcggcacggcggcggcccccacgggccgcaacgccgtgaggctcgcgaactgccgtcggagctcggccgccctgtcgtcgagctccgagccgcgcccctccgtgtgcaggcgcgtcccgcagacccacccgttgatcgccacccgcacgatggcgtccaccagaaaacccatcgcgcgggaggggctggtttttgcccgccgatccgtcaggtcgaggatcgcgtcgcccgtgacgtaccaggccagcgcctcgccctgctgcagcgtctggcggaaaaacacctttgggtcggccggggaggcaaagtgcatgacccccacgcgcgacagcccgaacgcgctatccggacacgggtagaacccggccggatgtcccagggccagggccgagcgcacggactcgtcccacgcggcgactcggggggtcaggcggtccagggggaatgccgcctgcagctccgggcccgacacgcggcccgcgagaatctcgaccgtcgcggaaggccgcgccccggggccgtcatcgtgcgcgacggcggcggggtagtcgtcctcctcgtagttgagctcgtccaggaacagcggcgagggcaccacccgcgaaccgcccacccgccccaaaacgtcgcgtgggtccatcgggcccaggtagcctccccgcggggcccgcgtgatggcgctgtcccggcgtccgcgaacggactggctcctggccgtaacggacctggggcgcggaaaggacgcccggcgggggggcgccgccgcccgggcctcggacgcgcgtcgggacccggggtgaccgcgggcctcccggcgacggcgcgggggcggctcttcgctcgccatctcccccgcggcctcgacctcgctgtcgtcgtccacgttaaacaccgcccgcaggtaccccattaacccgactccaccgccctcgggctcgtcctccacgggcgagtcggcgcgatgcgcggacggggcatgggaccgggtggaggcgcgcctccggcgtacggcatgcccgcgcacggacatggtggccggaggcccgattttttacacacgccctccccgcagacggacgaggaaaggggtggtgcgaggggggaggcccaaacggggaggtggggggtagggggcggtcccagggagcggggggtaggaaccggcacgacgggaacagagaaaacgcgaccgctccaacaagggtgggggggtgggcctcgtccccacgcagacccgcgggcaaatgcgagaacgggacccgcgcgcctgcctttatacgcggaccccagcaccacgagccgttctgtgacgcgaatctacacgaccgcgggctcgtaggcgcgactaacgcccaacccaacggcacacaccccccaccccgcgcgtaaccccatttctttcatggtcccgtaataaacagccaacgcacgccgcgtatgatgagttgcttgccaatgtttattgctgtggttgcgaaccctctatcgcgatacagacggaggtgaggcggggcggtggtggggggggggcgcgccgcccggtcgcacatcctaccccccaaagtcgtcaatgcccatggcatcggtaaacatctgttcaaactcaaaatcgtccacgtccaaagccccatacgagacggggtcgtgggtcattcccggggagggggactccacgtcccccagcatctccaagtcgaagtcgtccagggcgtcggcgggcgtcatatccacctcctcgccgtccaggcggagttcgtctcccaggctgacgtcggtaatgggggcggtggtggacagtctgcgggggcgttgtcccgcggagagaaacgacatgcgcggcgccaccagcccggcctccgcaggagcgtcatcgtcgtccgggaggtcgagcaggccctcgattgtcgatccgtaattgtttctggtccgcccgcggctatacgcgtgctcccgcatgacggactcgccctccgaggtcgcgacgctggagtacgagtccaacttggcccggatcagcagcataaagtacccagaggagcgggcctggttgccctgcaggacgggcggggtcgtgaggggcgccccgggttcctccgccgccgcacttcgcaccagcgggaggttcaggtgctcgcgaatgtggtttagctcccgcagtcgccgggcctccacgggaactccccgcacggtgagcgatccgttgataaacatcaggggctgaaacagacacgccaactggcgccagctctccaggtcgcagcagaggccgtcgaacagatcgggccgcatcatctgctcggcgtacgcggcccataggatctcgcggctcagaaagaggtatagatgcagaaacaggacgcgcgccaggcgcgcggtctcgcggtagtacctgtccgcgatcgtggtgcgcagcatctcccgcaggtcgcggttgcggccccgcatgtgtgcctggcggtgtagctgccgaacgctggcgcgcaggtaccggtacagggccgagcaaaaatttgccaacacggtccggtagctctcctcccgcgcccgcagctcaccgcggaaaaactgcgccatggcctcgtagtacgaaggcagctcgtcgcgggtggcgggcagggtggggaacgccacgtcgccgtgggcgcgaatgtcgatcggggagcgctcggggacgtgcgcatccccccagtcgatcacgtcgctgggcagcgtcgacagaaacttgcactcccggtacatgtcggcgttggtcgggaacccagagaacaggtcctcgttccaggtatctagcatggtacacagcgcgggacccgcgctgaagcccagatcgtcgaggagacggttaaacagggccgcgggggggacgggcatgggcggcgagggcatcagctgggcctgactcagccgaccggtggcgtacagcggaggggcggctggggtgttcttgggacccccggctggcctggggggcggtggcgaaaccccgtccgcgtccgcaaacagatcgtcgaccaacaggtccatgggggcggttgggtccgggaataacgatctcgagaggcgaatgagacgtgcccgagcgcccggcggcggagagggggggagggatccgggacccgcgacagaaaaaggccggggccctcgcgaagggaatcgccgggggtgccgtgcgtccccgaggactgacatctcgcgtccaccaccccgcatttaagtatcaccccagtgccgccccaaacctcgtgacttccccaccgctccgggcggcccgtcccccgcgctcggaagggaggcgtgtccttcctcccgcccctcccgcccctcccgcccctcccgcccctcccgcccctcccgcccctcccgcccctcccgcccctcccgcccctcccgcccctcccgcccctcccgcccctcccgcccctcgccacaaacgcgtgctgacagcgaagtggttaaatcgaccgtgatgctttattgtctgtcgtctgaacgcggtcggggtcgctactcgagggggcggcggggacgggaagccgagcgggcgggggcccgtgcggtcgcggcggcacgccccgcggggcggccccgggcggccgcggtcgcgtcgacgtcctgcgccgcgtcgggattcaccaactcgttcgcgcgctgcaggaggttcttgccctcgcagaccgtcacgcgaatggtggtgaggtcgaggagctcgttgaggtcttcgtcggtgtgcggccgcgacatgtcccacagctgtaccgccgccagccgggcgtgcgtggccgccaggcgcccgaccgcggcgcagaagacgcgcttgttgaacccggccacccggggggtccacggcgccgtggggctcggtggggcggtgctgaagtgcagcttcttggccagtccctgggcgggtgtcttggttcttcccgaggccgtgggagcgggggcgtctaggagcacggcggagtcggcctgggcgggtcgcctgccgcgggcggggtcggtcgccggggtcgcggaggccttaggcgccccgcgcgtcattttgggggtccgcgcgggaggggcgtgcgagcgcccgccggcgcccacggggcccccggggggtggaggagcgcgcgcggggccggggccgtgagagcccgcgacggacgccgaacgacgcggtcgcgcggtatcccgggactcgtcgtcgtccgaagacgagtcccggtagagggcatacccagcctcgtcataatggagaaagcgaacctcgcccctcgggcgcgcgcgcatcgggccagcgccgcggcggaagtcgtcgcgcggactctctgggtccgccggggagaccgggccatagtacagctcctcgtgggtcccgcgcggcgcttcccgcggacacgacttgacggagcggcgagaggtcatggtctatcggagacaccggggacgcccgtgcggatcacagggaaggcgtcggcgaaggaggcagagagcgtcggaaggcggcgagggagggaaagagggagaccggcggggtacgggagagcagcgagggcctgcgtaacccacgggggccgcgggagtggctccctgcgggttgcgggggagagtttataggaagtggatataaccgcaggcgacgggactaaccaatccccgggggggcaacggacagacacgccccgaacaggcccgacttccgcgaggaagcaaaggccgggggccgcccaacgacacgcccaccccttcccaacagggcgggctcaggctgacccggcggccagtgcccgctgacatatctgatacacgtgcgcgatcatacatacgcccatcgaggtcatgcctagataaaagggcaccaggacccccgggacggacaccacaccggcgctgtcgccccggcattgcgcgtccccgataacgccgcgtgcgcctgccgcgttcggcggctccccgggcacgcccgcgacgagcgcgacgaacaacagcaccacccagcggcccagtcttgcgggtttccccgtcatcgcggcgatgagtcagtgggggcccagggcgatccttgtccagacggacagcaccaaccggaatgccgatggggactggcaagcggccgtagctattcgcgggggcggagtcgttcaactgaacatggtcaacaaacgcgccgtggattttaccccggcagaatgcggggactccgaatgggccgtgggccgcgtctctctgggcctgcgaatggcaatgccgcgggacttctgcgcgattattcacgcccccgcggtatccggccccgggccccacgtgatgctcggtctcgtcgactcgggctaccgcggaaccgtcctggccgtggtcgtagccccgaacgggacgcgcgggtttgcccccggggccctccgggtcgacgtgacgtttctggacatccgggccacccccccgaccctcaccgagccgagctccctgcaccggtttccgcagttggcgccgtccccgctggcagggttacgagaagatccttggttggacggggcgctcgcgaccgccgggggggcggtggccctgccggccagacggcgcgggggatcgctggtctacgcgggcgagctaacgcaggtgaccaccgagcacggcgactgcgtgcacgaggcgcccgcctttctgccaaagcgcgaggaggacgcaggctttgacattctcatccaccgagccgtgaccgtcccggccaacggcgccacggtcatacagccgtccctccgcgtattgcgcgcggccgacggaccagaggcctgctatgtgctggggcggtcgtcgctcaatgccaggggcctcctggtcatgcctacgcgctggccctccgggcacgcctgtgcgtttgttgtatgtaacctgaccggagtcccggtgaccctacaagccgggtccaaggtcgcccagctgctcgtcgcggggacccacgccctcccctggatcccccccgacaacatccacgaggacggcgcattccgggcctaccccagaggggttccggacgcgaccgccaccccccgagacccgccgattttggtgtttacgaacgagtttgacgcggacgcccccccaagcaagcggggggccggggggtttggctccactggcatctagaccgcgcctcgcgtcgggccagatggggccccggtcaataaagagctctgtttcgcatatgccctggtgttggcggtttttttttgttgtctgtctgcccggcgctcggttgtccgttctgtcgtcgctatcacatacgcacaaacacacgggtagagtggaaccgaaaccggtcgacgtttattcaccacacagaaacacaagctaagcgagaaggaggggggcctcggtcgacgaggcctggcgtttgggggcggacgtgcgatgacgtgggtccggtgtagggtccgcggggggcacgggcccggggcgaacgggggatctgtcgccggcgtgggtgactgggaccgacgcaacctccggggcttgtgccctcgtaggcccggggggggcctcggtcgctccaagccccgcggtgcgggtccctccggccagagccgaggtggagagaccaagggcccgctccgcgatcgccacgtcctccatgaccacgtcgctctcggccatgctccgaatggcctgggagacgagcacgtccgccgacttgtccgcggcccccaccgacatgtacatctgcaggatggtggccatgcacgtgtccgccaggcggcgcatcttgtcccgatgcgccgcaacggccccgtcgatggtggagccctcgagtcccgggtggtggcgcgccagcctctcgaggttgaccatgcaggcgtggtatgtgcgggccagggcgcgcgccttcacgaggcgccgggtgtcgtccagcgactctagggcgtcgtcgagcgtgatgggggcgggcaaaagcgcattgaccaccgccagggcctcctgcagccgcggctccgcctccgagggcggagccgcggcccgaatcatctcatattgttgttcctcggggcgcgttccccaaccgcacagcaccccgagcagggacgccatcccggaacacgcgcgcggctctgcgccggctttcccccaccccaccccctccgggttcgcaggggcgatggggacggaagactgcgatcacgaagggcggtcggttgcggctcccgtggaggttacggcgctgtatgcgaccgacgggtgcgttatcacctcctcgctcgccctcctcacaaactgcctgctgggggccgagccgttgtatatattcagctacgacgcgtaccggtccgatgcgcccaatggccccacgggcgcgcccaccgaacaggagaggttcgaggggagccgggcgctctaccgggatgcgggggggctaaatggcgattcatttcgggtgaccttttgtttattggggacggaagtgggcgtgacccaccacccgaaagggcgcacccggcccatgtttgtgtgccgcttcgagcgagcggacgacgtcgccgtgctccaagacgccctgggccgcgggaccccattgctcccggcccacgtcacagcaactctggacttggaggcgacgtttgcgctccacgctaacatcatcatggctctcaccgtggccatcgtccacaacgcccccgcccgcatcggcagcggcagcaccgcccccctgtatgagcccggcgaatcgatgcgctcggtcgtcgggcgcatgtccctggggcagcgcggcctcaccacgctgttcgtgcaccacgaggcgcgcgtgctgggggcgtaccgccgggcgtattatgggagcgcccaaagccccttttggtttctgagcaaattcggcccggacgaaaagagcctggtgctggccgctaggtactacctactccaggctccgcgcttggggggcgccggagccacgtacgatctgcaggccgtgaaagacatctgcgcgacctacgcaatcccccacgacccacgccccgacaccctcagtgccgcgtccttgacctcgttcgccgccatcactcggttctgttgcacgagccagtactcccgcggggccgcggccgctgggtttccgctgtatgtggagcgccgcatcgccgccgacgtacgcgagaccggcgcgctggagaagttcatcgcccacgatcgcagctgcctgcgcgtgtccgaccgggaattcattacgtacatctacctggcccactttgagtgcttcagccccccgcgcctggccacgcatctccgggccgtgaccacccacgaccccagccccgcggccagcacggagcagccctcgcccctgggtcgggaggcggtggaacagttcttccggcacgtgcgcgcccagctgaacatccgcgagtacgtaaagcaaaacgtcacccccagggaaaccgccctggcgggagacgcggccgccgcctacctgcgcgcgcgcacgtatgccccggcggccctcacgcccgcccccgcgtactgcggggtcgcagactcgtccaccaaaatgatgggacgtctggcggaagcagaaaggctcctagtcccccacggctggcccgcgttcgcaccaacaacccccggggacgacgcggggggcggcactgccgccccccagacctgcggaatcgtcaagcgcctcctcaagctggccgccacggagcagcagggcacgacgcccccggcgatcgcggctctcatgcaggacgcgtcggtccaaacccccctgcccgtgtacaggattaccatgtccccgaccggccaggcgtttgccgcggcggcgcgggacgactgggcccgcgtgacgcgggacgcgcgcccgccggaagcgaccgtggtcgcggacgcggcggcggcgcccgagcccggcgcgctcggccggcggctcacgcgccgcatttgcgcccggggccccgcgctccccccgggcggcctggccgtcgggggccagatgtacgtgaaccgcaacgagatcttcaacgccgcgctggccgttacgaacatcatcctggatctggacatcgccctgaaggagcccgtcccctttccccggctccacgaggccctgggtcactttaggcgcggggcgctggcggcggttcagctgttgtttcccgcggcccgcgtagaccccgacgcctatccctgttattttttcaaaagcgcctgtcggccccgcgcgccgcccgtctgtgcgggcgacgggccctcggccggtggcgacgacggcgacggggactggttccccgacgccggtggtcccggcgacgaggagtgggaggaggacacggaccccatggacacgacccacggccccctcccggacgacgaggccgcgtacctcgacctgctacacgaacagataccagcggcgacgcccagcgaaccggactccgtcgtgtgttcctgcgccgacaagatcgggctgcgcgtgtgcctaccggtccccgccccgtacgttgtgcacggctccctgacgatgcgtggggtggcgagggtgatccagcaggcggtgctgttggaccgcgacttcgtggaggccgtagggagccacgtaaagaactttttgctgatcgatacgggcgtgtacgcccacggccacagcctgcgcttgccgtatttcgccaagatcggccccgacggctccgcgtgcggccggttattgcccgtcttcgtgatcccccccgcgtgcgaggacgttccggcgttcgtcgccgcgcacgccgacccgcggcgcttccactttcacgccccgcccatgttttccgcggccccgcgggagatccgcgtcctccacagcctgggcggggactatgtcagctttttcgagaagaaggcgtcgcgcaacgccctggagcactttgggcgacgcgagaccctgacggaggttctgggccgctacgatgtgcggcccgacgccggggagaccgtggaggggttcgcgtcagaactgctggggcgaatagtcgcgtgcatcgaggctcactttcccgagcacgcgcgggaatatcaggccgtgtccgttcgccgggccgtcattaaggacgactgggtcctgctgcagctgatccccggccgcggcgccctgaaccaaagcctctcgtgtctgcgcttcaagcacggcagggcaagtcgcgcgacggcccggacctttctcgcgctgagcgtcgggaccaacaaccgcctatgcgcgtccctgtgtcagcagtgctttgccactaaatgcgataacaaccgcctgcacacgctgtttaccgtcgatgcgggcacgccatgctcgcggtccgctccctccagcacctcacgaccgtcatcttcataacggcctacggcctcgtgctcgcgtggtacatcgtctttggtgccagtccgctccaccgatgtatttacgcggtgcgccccgccggggcgcacaacgataccgccctcgtgtggatgaagataaaccagacgctgttgtttctgggcccgccgaccgccccccccggcggggcatggaccccccacgcccgcgtctgctacgccaatatcatcgaaggtcgggccgtgtccctcccggccatccccggcgccatgagccgccgggtcatgaacgtgcacgaggccgtaaactgcttggaggccctctgggacacccagatgcgcctggtggtcgtcggttggtttctgtatctagcgttcgtcgcccttcaccaacgacgatgcatgttcggcgtcgtgagtcccgcgcacagcatggtggccccggcgacctatcttttgaactacgccggccgcatagtgtcgagcgtgttcttgcaatacccctacacgaaaatcacccgcctcctctgcgagctatccgttcaacgccagaccctggtgcagctgttcgaggcggatccggtcaccttcttgtaccaccgcccggccattggcgtcatcgtgggctgcgagctgctgctccgcttcgtggccctcggtctcatcgtcggcaccgctctcatctcccggggcgcctgcgcgatcacacaccccctgtttctaacaatcaccacctggtgtttcgtgtccatcatcgccctgacggagctgtatttcatcctgcggcggggctcggcccccaaaaacgcggaaccagcggcccccagggggcgctccaaagggtggtcgggcgtctgcgggcgctgctgttccatcatcctctccggtatcgccgtgcgcctgtgctatatcgccgtcgtggccggggtggtgctcgtggcgcttcgctacgaacaggagattcagcggcgcctgtttgatctgtgacgtaacgcctcttccgttggaagaggcggacccagtcgcccatacaaattaaatacacgacccgcctcgggcctacgcaccctcgcacgtcgcatgcaaattaaaatcgtgcacagagccgatccggcctcgggtctgcttgcccctcccccggcccagcacaggcaggctcgtccgacttccgcatacaccccaccctaccgcgtgcttccgcacccccgcctacgcgtgtacgcgaaggcggacccagacctgccgtatgctaattaaatacataaaacccaccctcggtgtccgattggtttctggggacggcgggggcgggggcggtgacgcccgacggggagggacaaggaggagtttcggaaagccggccccggtcgtgcgggtataagggcagccaccggcccactgggcgctgtgtgctgccgtgtgccgaccccggttgcgcgtcggtgccgctcctcgattcggacccggccactctcttccgacacgcgccccctcggaggacacccgccatcccagccccggcgacctacaacatggctaccgacattgatatgctaatcgacctaggattggacctgtccgacagcgagctcgaggaggacgctctggagcgggacgaggagggccgccgcgacgaccccgagtccgacagcagcggggagtgttcctcgtcggacgaggacatggaagacccctgcggagacggaggggcggaggccatcgacgcggcgattcccaaaggtcccccggcccgccccgaggacgccggcacccccgaagcctcgacgcctcgcccggcagcgcggcggggagccgacgatccgccacccgcgaccaccggcgtgtggtcgcgcctcgggaccaggcggtcggcttccccccgggaaccgcacggggggaaggtggcccgcatccaacccccgtcgaccaaggcaccgcatccccgaggcgggcggcgaggtcgccgccggggccggggtcgatacggccccggcggcgccgactccacaccaaaaccccgccggcgcgtctccagaaacgcccacaaccaagggggtcgccaccccgcgtcggcgcggacggacggccccggcgccacccacggcgaggcgcggcgcggaggggagcagctcgacgtctccgggggcccgcggccacgaggcacgcgccaggccccccctccgctgatggcgctgtccctgacccccccgcacgcggacggccgcgccccggtcccggagcgaaaggcgccctctgccgacaccatcgaccccgccgttcgggcggttctgcgatccatatccgagcgcgcggcggtcgagcgcatcagcgaaagctttggacgcagtgccctggtcatgcaagacccctttggcgggatgccgtttcccgccgcgaacagcccctgggctcccgtgctggccacccaagcgggggggtttgacgccgagacccgtcgggtttcctgggaaaccctggtcgctcacggcccgagcctctaccgcacattcgcagccaacccgcgggccgcgtcgacagccaaggccatgcgcgactgcgtgctgcgccaggaaaatctcatcgaggccctggcgtccgcggatgagacgctggcgtggtgcaagatgtgcattcaccacaatctgccgctccgcccccaggaccctatcatcggaacggcggccgccgtgctggaaaacctcgccacgcgcctgcgcccctttctgcagtgctacctgaaggcccgaggcctgtgcgggctggacgacctgtgctcgcggcgacgcctgtcggacattaaggatattgcctcctttgtgttggtcatcctggcccgcctcgccaaccgcgtcgagcgcggcgtgtcggagatcgactacacgaccgtgggggttggggccggcgagacgatgcacttttacatcccgggggcctgcatggcgggtctcattgaaatactggacacgcaccgccaggagtgttccagtcgcgtgtgcgagctgacggccagtcacactatcgcccccttatatgtgcacggcaaatacttctactgcaactccctattttaggcaagaataaacatattgacgtcaacccaagtggttccgtgtgatgttcttggcgcgcgcggcgggtggggcggagactccggggcgatgccggcgtgcgcgtgggaggagggcgatgacccaccggataaatgtggggccccggcccggcccgcttcatagcgcgtccaggaactcacggcagacgcgtattcaccgacccccccctcgcaacatgacaacgacgcccctctcgaacctgtttttacgggccccggacatcacccacgtcgcccccccgtactgtctgaatgccacgtggcaggccgaaaacgccctgcacacgaccaaaacggaccccgcgtgcctggccgcgcggagttatttagtccgcgcctcctgctcgaccagcggccccatccactgttttttctttgcggtgtacaaggactcgcagcactcccttccgctggttaccgagctccgcaacttcgcggacctggtcaaccacccgcccgtcttgcgcgaactagaggataagcgtggggggcggctgcggtgcacgggcccattcagctgcggaaccatcaaggacgtctccggtgcatcccccgcgggggaatacacgataaacggtatcgtgtaccactgtcactgtcggtatccgttctccaaaacctgctggctcggggcatccgcggccctacaacaccttcgctctataagctcaagcggcacggccgctcgcgcggcagaacagcgacgccacaaaatcaaaatcaaaatcaaggtataacccacccccttccctccgagtccgtatgcaacctcattaataaagagtgagaaccaaccaaaacagacgcggtgtgagtttgtgggttataggaacccggtaaataccacgcgacgaaccagcatgtgtgttaacgcaacttttattcgttgtatcgcgggaggggggaagcttaccgccaaaggaaggccaagatgataacgacgaccaccgcgaccaccccaaaaaccgcatgacgacacgtcccgccacaccaccctggggcttggggcgtgtcggagctcgacgcacagcgggccgcgcgttgggcccggtacagctctcgcgaattgacaagcgggggtcgccacgtgcgcgagctttgcacgcggggttggtcggccggccccacggacccgcccggtggctcggtcggacatgcggccatgaccatggcgtaggtgggggggcgatccgaggtcgcctctgcgtaagtagggaggcccgacgggaggtcgcctcccacgccagggtgggccccaatcatagtttccggtagaaacaggggggtctccacaaacaacccccctgggccaaagctccggcgccgcgcccgtcgttcggcgcggcgcctggcgcgccgagcggcccgccaggcggcgcggcgcgagcggccacgctcacacacctcgccgtcaccggaagaagccggtgaaacaagcccaaccggcgacgtccctgcagagtacggtggaggcgagtccgtgggggtgtcgatatcaataacgacaaactggcccgcgctcgcgccggccacactctcgtatgggggcggggcgtcaatcacgctatcatctccgtcatccctgcatgcgtgggcatgcccagcccccaacgccatggtggggattcgcggctcagaagcctgcatgtcgtgtggtcggtcgtagtccaacgtgcctcccccacccaccacacagccggtccccacgccgaccactagaccgcagacgtcgcccaaccgaggtccccgtgcacagaccgcgccttttatagccccaggggttgctaattaacgcacgcatgcagacgcaatttattttgctcccccgcgtcctcccctcccctgcgcacacgtgataggtcttgggaacccgaggggcgacgcggggaaagcgcgcccccgcccggccgccgcgcgcccccgcccggccgccgcgcgcccccgcccggccgccgcgcgcccccgcccggccgccgcgcgcccccgcccggccgccgcgcgcccccgcccggccgccgcgcgcccccgcccggccgcccgcgtcgcgccggcgccccctcccggcgcttccggggtctttccttccttccccgccgcgaccccgaccccgccccaccgccccgcccggcaggggggccccggcgccgcgcagaacacacagacgaacacacggtggcgatcttttctttacttcggcggaccagcgagccccggccccggcccgcgccccgccgccacacccacggcacccccccccgccgcccaccccggggtccacacaggagcgcgcgggcggcagaaacgcgggcgcggcggcggtcggggtgggagtggtggtgggggacacgaaaacacacccacgacactctccccccaccccgaccgccgccgcgccccaccggcgggatcgcggcgagacgcagccgggcccccccccaccacccgcccacccacctaccccgcgcccgcagcctccggcagcacgccgaccaccgccgccaccccccaaacagccaaggcgcggtggggggcgtggtggtgaacgatggggggaacacgggggggaggggtccggggcgaggcgggcgggcgaaggaagggggggtggtggcggcggcggtggaaagcggaaaaacggaggatggaagggcagaagatggggagtcccgatcctcctcctgcatcccctcgccttccattctccggccctccgcgagtcccgacgccccccccccgccgcccgacgaaggagacccaagcaccgcagccggagaggccgagcggggagtgggcggccgggcgggaggatggcggagagagagagagagagagagagagggggggggggggagagggaaagcaacgggaaagagaggcgcgcggaaaagcagcaagaggggggacggggcgagccgggcagagtgcggagcccccggagcccgcggccgcagccgagcagcgccgcgggctccggggccgggccgggccggcaacgccccgcgccggccgcggcggagagaacccctgtgtcattgtttacgtggccgcgggccagcagacgggccgcgggccagcagacgggccgcggcgccagcggcccacgcctcccgccgcattaggcccccgcgggcatccggcggccggccccacgcccttccattaaacactcccacgttgggggggggcgcgccagctgagtgctctgcggttgcgggcgccgtgcccggagatccattaagccgccggagagcccgagccccgcccgcgtgttgctgtgggcatttctgctgcgtcatccctgtctttataaaaccgggggcgcggcagcaacgaacgcaggggcccgccgccgatcgagagggactccggagaaggaaggctgctccgcgcaccggcgcgcccttctcctctcccctccctacctccccctctcttcccccttttttcccccgcctcccgtcttcttccgcgcctccgagggtccgcctcttgcctcggggacccccgggcgggccggggcttggccgccgaggtgcgccccggccggaggggcccccgcacctcggcggccgccccctccggcgccgcgcgttcgcgaaaggcgcgaaaggggcccccggaggcttttttcgattcccggccgggggtcccgggtagccgcccggcgccgggcggaaggcgtcccccgcccggcggtccggcccgggcccccggcggagcgcgggggccccggggccccgggccgcgccggcggcgtttccgcgttccgtttcttctccctcccgggccgccccgctcccgggcccgaccctcgccccttcccttctcctcgtcttcccccgtcccgccgcgccccttccctcttccttctctctctctgtctcgctctcctcacatttcccccccccccccccgccgccgccgccctttgcccgcgtcccaccgagacgccgcgccgcgtgagccgtccgccgggggacccaggctccggggggggggggcgcctgcgtgtgtctcgtgtgagagagcgcgcccctcgaacgccgcgcgttctcgcaggtaggtttagggtcgtacaggtgagcttctgctgaggcggcggggagagggggggggggcgggcggaagagagaagagagcaggggttgggggagaactgttcttcctccccctttcaagaaacacgaggcgggggtcccagaaagggcaggcaggtcagccgcaccgcccgcgagccaacccgtatcctttttttctaggtgtttttgtttttgtttctgtttttgtttgttttgttattattttcgcggatccggcgtgttcggatccaccccccctttctccttcctcttcccttccacccacccccgtttcccccccccccgtcgtcgttcccgggggggcaggcgcgggtcgggcccgtacgcccaccgcccccacgcgccggtcacccccccccaacaaccccaaaggcgcgtgcccggccacagccgtgggtgtggcgcccgtccccttcctctaccgcgtgggcgcgggcgggggggtggtggtagtggtggcggaaggaaacgggccgggggccggggccgctagggaaaggtaggcacgcgcgcggtgtgtcgacttgcatgccccgcaaaacgcgtcgtgtcgtgttgtgtcgtggtgggccgtgttgtggtgggccgtgtggtgtggtgtggtgttgcgaacgcgcgagccccctcgccccgatgggagtctccccgcagccagggtaaggaggggcgggcgtggcgggcaggtgtgcgggcggggtggggtgagtgcggttgcatgcctcgggtctcctcttcctgctcctcctcctttctcccagccagggtgaggaggggcgggcgtggcgggcaggtgtgcgggcggggtgggcgccggggcgggggtgggcacgggcgtaagtgcgggtgcatgcctcgggtcttctcttctccctcctccttcctcccacccgtccccgggggcagagggcgtgcatgcgttgtgattcaaccgccctcgcccccgccccactttcccccctctctatcaaagttccctggcccctggcttcgcgccggtggtgcggctgaccccccccctcctccctccccgagccaggcgccctcccactcctgcccaccacccccagggtctggccggccagacgtgcgtgctctgcacgatcgggcccccctccctgtcaacacggacacactctttttttacccgccagccagcccgcccacccaccaagacagggagccagaacgaggccgggccccggctctgttctatgataaagaccaacaggcctcgggggtgggggcggcttctcgtgcccgccccccctcctcctcctcccttcccccccatccccggcccccctgcgcgggggagctgcatcaaaggccaacaacaaagtgtgtcaaaagcatcacaaaactttattgtaaaatttttataaatataaagttttttttttcctcaagttttcaacaaggccagaaagtccataacaaaatgctggtgtgtgttgctgttcggggccgtgtccgtcccccccccccactcccacccccacttcctgtctcctccccgtctttccccccccccacctccccctgcccccgaggcgcctcggccggtggtccggtggggggcggcttccttcgggcagcaagccgagtgttagctccccctactccccgtggcccgcgggggcgtcgccggccggcgcgggcgcgccctgctcccgagaccacgggtggcgcgaccggaggccgtggaagtccagcgcgcccaccagggtgccctggtcaaagagcatgttgcccaccggggtcatccagaggctgttccactccgacgcggggggcgtcgggtagtcggggggcctcacgcagttgcgcgcgtgctcggggagcagggtgcggcggctccacgcgggggccgcggcccgcagcaggtccgccacgttccccgtctggtccacgaggaccacgtaggcccctatgtggcccgtctccatgtccaggacgggcaggcagtcccccgtgaccgtcttgttcacgtaaggcgccagggccacgacgctcgagacccccgcgatgggcaggtagcgcgtgaggccgggcgccgggtcgcgggccccgggctcggggccgccctccgcgtggcgcgtcttcctggcacacttcctcggcccccgcggcgcagcagcgcgggggccgagggaggtttctcgtctctccccagcgccggacgcggacgcgacgctcccaccagccccgcccgcagaggaagaggcggaggaggaggaggcggaggaggaggaggcggaggaggaggaggcggaggaggaggaggcggaggaggaggaggcggaggaggaggaggcggaggaggaggaggcggcggcgaccgcggcctgggacgacggagacgccgacgggggcgcggcgcccgcggacgccggggcgagcggcccgtggccgcggtcgcccgagtccgagtccggggcccggcgcggcgccgccctcttggcccccaccccctggggggcgaggggcgagcgcggggcggcggaggaagaggcggaggacgaggccgcggggcccgagtccgacccgcgcctcttccgggggcgggccgccgccccctccgcggcgtggggggcggcaccgggggtgttggtgccgcgggggaccccgggtcctccctccgcgcccggccctcccgacccgcgcgcgtcggtcgcgcctgcccggcccagactctgtgcttgggtgtcggtctgagcctgggtcatgcgcgaccggggcgcgcggtgcgcgtccaccggcacggcgggcggcgcgggcccggccgcgtccgcgctcgcagacaccacgggggcggcggcggcgcggggcggactccggacgcgcggggcgacggccgcgcgggggcgcgcggcgcgccccgacgactgtggcagacctccccccccggggcccgaggacacctgtgcggaggaggaggagacaaaggagagcggcccggggcccgcggggcggcgcggagacggcgggggagagtcgctgatgactatggggggctcctgggccgcgcggggctgtctcgcggggggcgtcctgccctccgccgccgcggcgtcttcgcccacccgccgcgcctgcgcgcgccccccgccggccgcagggggaagagaggccactctcggcacgacggccgcgacggcagggccgcccccagacccagatcccacccccgcccgcaacggggcgccgccgctgctgctgctccgcggggcgccagggggcgccggtcgggtcgcggcgggctgggaggttccgcgggtcgcccccgcaccgccgcccccgcgccggggcgctcttcggggggcgggcgggacgtagtccactgcagagggagacagagacgggagcccccggttagtgcccgacccccgcccgacccccgcccgacccccgcccgacccccgcccgacccccgcccgacccccgcccgacccccgcccgacccccgcccgacccccgcccgacccccgcccgccccccgcccgacccccgcccgccctcaccgtcggccaggtcatcgtcctcgtcgtccgtgccgggccacgggggggtgggcgacagggcgcggaccgtgtgtccccccagcgacagggagcgcggggccgtccgcgggttgcccgtccagataaagtccacggccgtgccggcccgcacggccgcctcggcctccacgcgggtccgggggtcgttcactatcgggatggtgctgaacgacccgctggcggtcacgcccactatcaggtacgccaccggggtgttgcacaggggacacgtgttgcgcaacggaatccaggtcttcatgcacgggatgcagaaggggtgcaggcagggaaaactctggcagcgcaggggcggggcgatctcgtccgtgcacacggcacacacgtcgcccccccctcccgcttccgcttcctcctcacccacgggcccacccccacaggatccctgcgcgtcggcgggcgtggggctgccctggcgctcggccgggggccgggccgggggcgtggccgcgtccatcaggcccgcctcgaacatctccgtgtccgtgctgcccgcctcggaggtggagtcgcggtgaaggtcgtcgtcagagattcccacctcggtctcctcctccgagtcgctgctggcgagccactgcatgtcgttgagcatcccccaggcgtgcggggcggcgggctgcttgacaaagcaacgggggggatttagagggcgcggggcgtgaggcgggacccccgcgccgtgtcccccgtgtccctccctcaccccggccccccgcccgctgctttttgttcggaagggggggagaaaggggtccgtaaccaaaggtggtctgcgtcctttggattccgacccctcgtctccccccctgtcccccgctctcgggctcctccctgcctccctcgcccccccagagggtcggggggcggcgcacggcccacgggggtcccccgaccgcttaagcgggccgggggtcggccccgtcaagcgtccccgcccccgagcccaccgcccgcgaccacccccaacccgcagccgggtggtccggggaaaagggggggcctgagacccgggggtcgccctctcaccgtgccgggggtctgccgcggcggccgctcggggccggggtccgcccgggagctcgtgccgggccggggttccatgagccggggtagggtagactcgagacggcggcccgcggtctctctcttgccgggttttagtctctgtctctccgggtctcctcctcccgccgggccgccgctccgtcgctcgcagtgccggggtgcgaatgcggcccgaccgtcacacggggctgccttatacccggcgcctatccactcccccaaaggggcggcatttacgattcccccaatagccgcgcgccccggcgggggcggagggagggaatccccccctctcggggcggccccgtccccggggaccaaccgggtgtactccaagaaccccattagcatgcgccgccccccgccgacgcagatgggagtccccccggcgccccgccggcgcggccctgagtggtgcccgcccccggggaaaaattcattagcatactaggaagcccaggggaccaataggggccgatcagcccacccacccggcggcgcgcgaggctctgcgtgttctgccaagaaagtaatcagcataacccggaaccccgagggagtaattacgcggggagcgaggggccgtccgaacgtttttaattaccataagcgggaatggcggcccgttaaaagctgctaattaccgcgagcgggaacgccggcccattaaaagttgctaattaccatgcgcggggatggcggccgggaccgcctattaaaagtttctaattaccataccgggaagccggcgcggggcggtcgccggggcggagtccgggcccgcgcggcggcgcgcggttggccggcgccgccccctggggcgggcggagcggcggggcggcgccgggccctcgcggatatatacgcggggctcccatcgtctcttcggagagcggcctcgcgcagaccttcggagctccggggctccgccggccgaggccgccctcgccggttcaaccctagaccgcccgacggcccgggcccgcggcggcggaggacccgcgcgccgccgccgccgcctcctcctcctccgcgggtccgccgtcttcgtgggcccgggctcgggctcgggcccgagctcgggcctcgggctccaggcacggtccgatgaccgcctcggccgccgccacgcggcgccggaaccggtcgcggtcggcccgctcgcgcgcccaggacccccgtcgggccaggcgcgcggccgtctcccaggccaccagatggcgcacctgcacgcgcggcgagaagcacacctgcgggcggggagacacgggggtcggaggggcgtcagggggtcggaggggcgtcagggggtcggaggggcgtcagggggtcggaggggcgtcagggggtcggaggggcgtcagggggtcggaggggcgtcagggggtcggaggggaggcgtaccttcccgcgcggcgcgtccgcgggcggggacgcggggggccgccgccggcgcaggctcaggcgcgccaggtactccgtcgtggtgcgcagccgtagcgccaggtggggcggaagggggcgctgcggcccgcgctccttgcgcggcggcggcggggggcaggcggcggcaggcgcggcgtgcggggcctccggcgccttccccccgccctcgctcggggggctgttcgcccactctgcgtcgtcgttgccggcgtagtccgcgtcgtcgctgtcgtccgcctggggcaccagcagccagcgccgcaggagcgaggacgcggccggcgcgctctcgaccgcggttcccgagtcgtacgcagggaccatttgggagtctgcggttgggagcgcgccggggcgcggcacggctggagcgccggggcgcggcacggctggagcgccggggcgcggccggcgccggggaccccggcggcggggaccccggcggcgggacatggcgggcggctgggctcggcgtaggcccggagccggagcgcgtcggggcgggagagttcactcggcacgcatgcacgtgtaaccgccagtccgtgcttgcctagcgaactcacccgtcccggctggcgtgcgcagcccgggccgtgttgcgggccctcttaaggggcggcggcaggacggggactcccgccccgcctcttttcccccggggagtcaacccccggggggggtgttttttgggggggggcgcgaaggcgggcggcggcggcgggcgggcggcagggcagccccgcgcgcccccttccccgtccctcccccggagccggccgctcccccgcgggcgccgcccctccccccgcgcgccgcggggctgccttcccgcgggcgcccccgcgcggcttttttcccgcgcccgcccccgcgcggcaggacggggactagcaggctgtgccgcagaccaccacacactcccaagctccccgcccccccgaagacgccagtcgcaccaccgctcgccctcgcagaccagacagttgcaccaagcacccgcccgcccgcacacggttccccgccaccccctccctcccctccatcccgccgagctcgcggcagcccctcccccccgcgcgccacggggctgcggtcccgcggccgcctcccccgcggccgcctcccccgcgccccgccccgggggcttcccccgcccctccccccgcgcccgcggccccgagctcgcagcagcccctccctcccgcgccccgtgccttccctcccgctcctgcgggggggctcgggccacctgaccttcgtaacctgcactcaggtcagagccccagaccccccgcgggcgcgggagacgtgccgcccgcccgacccccgcccgcccgacccccgcccgcccgacccccgcccgcccgacccccgcccgcccgacccccgcccgcccgacccccgcccgcccgacccccgcccgcccgacccccgcccgcccgacccccgcccgcccgacccccgcccgcccgacccccgcccgcccgacccccgcccgcccgacccccgcccgcccgacccccgcccgcccgacccccgcccgcccgacccccgaataaaccacacaaggcggtacgttttcgtctgtctcgttctttatttctcacacacgcgcgcggccatcgccgcgtctgtcttaaaggcgcacagacgcccgattccttccccctctccccatctcccccctcccccgctcccggaagtttccccccccgtcactccccaaacagtccgtcgtcgtcgtcctccagctccgcgtccatgtccacgggctcgcgcctcggcggcgtggccagccccgcggcggtccccaccacctccacgccgccgcccgccgcggccagcaccgtccccgcgcggcccgcggccgacgcccagcgtatctgcgggggcgggcccgcgtccgcgtcgtcgcgcagcaccagcgggggcgcgtcgccgtcgggctcgagcagcgcccgcgcgcagaactcccgccgcggcccgcgcagctccgccgggccgccgcgcacggcgtcgcgccccagcgccacgtagacgggccgcagcggcgcgcccaggccccagcgcgcgcaggcgcggtgcgagtgcgcctcgtcctcgcagaagtccggcgcgccgggcgccatggcgtcgcccgcgcccgaggcggcggcccggccgtccagcgccgggagcacggcgcggcggtactcgcgcggggacatgggcaccagcgtgtcggggccgaagcgcgtgcgcacgcggtaccgcacgttggccccgcggcagaggcgcagcggcggcgcgtcggggtacaggcgcgcgtgcgcggcctccacgcgcgcgaagacccccggcccgaacacgcggccggaggccagcacggtgcggcgcaggtcccgcgccgccggccagcgcacggcgcactgcacggcgggcagcacctcgcaggccaggtaggcgtgctgccgcgagaccacgggcccgtcggcgggccagtccgcggcgcgcacggcgttgacgacgatgaggcggcggtcgcaggcgccggccagcagccccaggaactccacggcgccggcgaaggccaggtcccgcgtggacagcagcagcacgccctgcgcgcccagcgccgagacgtcgggggcgccggtccagttgcccgcccaggcggccgtggcgggcccgcagagccggttgcccagggccgccagcaggcaggacagcccgccgcgctcggcggaccactccggggggggcccgcccccggcgcggcccgcggccaggtcctcgcccggcagcggcgagtagaggatcaccacgcgcacgtcctccgggtcgggcacctggcgcatccaggccgccgcgcggcgcagcgggcccgaggcgcgcagcgggccgaaggcggcgggcgcgccgccggggggcggggcggcgcagcgcgcggccagcgaggccagcgcgcgcgggtcgaacatgagggccgggcgccacggcgcggggaagagcgggtggtccgtgagctcggccacggcccgcggggcgcagtaggcctccagggcggcggccgagggcgccggcgtgtggctgggccccggcggctggcggcgccagccgccctgcgggtcggggccctcggcgggccggcgggtcagcgccgcggggcgcggcggccgcggcggcggcgtcggcggggcggggggcgcggcccccgcgggaggggcggccgcggggcggggggcgtccgcgcggctcttcttcggggggcgcggggcgccgcccggcggcgccctggccggggcggggctcttgcgcttgcgcgcctcccgcggcgcggaggcgggcgcggcgagcgagtcggccgcggcgacggtgtcggccagcagggggcgcaggctctggttctggaagagcaggtccgcggcggcggcggcggcggagctcagcaggcgcgggctccgcggcagcgccgggcccagggccccggcgaccaggctcacggcgcgcacggcggccacggcggcctcgctgccgccggccacgcgcaggtccccgcgcaggcgcatcagcaccagcgcgtcgcgcacgaaccgcagctcgcgcagccaggcgcgcaggcggggcgcgtcggcgtgcggcggggcggccgcgcccgcgggccccgggcgcgggggcgcggcgggccgggctccggccagccccggcacggccgccaggtcgccgtcgaagccctccgccagcgcctccaggatcccgcggcaggcggccaggcactccacggccacgcggcccgcctccgcgcgccggccgccgccaccaccgccggcgccgtcgtcgtcgtcgtcgtcgtcggccccggccggcgcggaggcgggcgcggcgctcaggcgccccagggcggcgagcacccccgcggcgccgtagccggcgggcaccgcgcgctcgtcggccggcgacgccgccgccgacggcaacggggcggcggcggcggcgggcttcccgcgggcgtcgtcgccgtcgtggcggttggcgtcgccgccgtcgtcgggggttcgcgccccggtcagcgccgcgttctcgcgcgccagcaggggcgcgtaggcgcggcgcaggctggtcagcaggaagcccttctgcgcgcggtcgtagcggcggctcatggccacggcggccgccacgtgcgccaggccccagccgaagcggcccgccgccatggcgtaccccaggtggggcacggcccgcgccacgctgccggagatgaaggagctgctgttgcgcgccgcgcccgagatccggaagcaggcctggtccagcgccacgtccccgggcgccacgcgcgggttctggagccaccccatcgcctccgcgtccggcgtgtacagcagccgcgtgatcagggcgtactgctgcgccgcgtcgcccagctcgggcgcccacacgggcgccggggcgcccgaggcctcgaaccgggcccgcgcctcctccgcctcgggcgccccccagaggccggggcggctgtcgcccagcccgccgtacagcacgcgccccgggggcggggggccggccccgggccacggctccccgctgacgtacccgtcgcggtagcgcgcgtagaaggcgccggaggccgcgtcggcgtccagctcgacccgccggggccgcccggccgtgaagcggcccgtggcgtcgcggccggccaccgccgcgcgggcccggcggcgctccaggcggcccgcggtcgccgcgggggtccgggccggggcgggctcggccctgggcgggctcggccggggcgccgcccccggggccctcgcgggcacccccgcctcctcgtcgtccgcgccgagggtcccgcccgcggcgtggtctgcggcgctggcgggggcgcgggcggcgtcgtcgtcgtcgtcgtcgtcagacgaggaggcggatgcagacgaggaggaggaggcggaggaggaggcggaggacgccgacgacgaggatccggattttgatgagtcagaggcggccgagcgccggcggggggcgcgccggcggcggtggtggtggtggtggtggtgtcggcggggcgccgggggtcgcggcgacaggctggccatggggtccgggtacgccccgcggaccgcggacgtcgtctccggtccgcggacccagcggcccgcgtcgcggtcgtcgtcatcgtcgtcgtcgtcgtcgtcgtcgttctcctcgccataatcggcgcgcatggagggggtccgcggcggagaaggcgagcgggccgcttcttcttgcgcgccgtcgcgctccggggggggcgacgggatcgtgcgaacggcctcgtccaccatcgaggccagcagggccagctgccgcggcgagacgacgccgtccgcggcaggctcgtcgacggcctccccggacgccggggccgcctcgtcggcatcggcatcggcggcggcgtcgtcggcctcgtcttcgttctcctccggcccaccgtgccacccgaacccgggccgcgcggcggggcgacggtccgggttcggggtgggcggcggtccgtcggctggatccggagatccggggccgccggtcgtctccgccgcggcccggagacgtcccccgtcctcgtccgccatcgcgacctcggccccgcggccctgcgtcgtcgtcgtcgtcttcttcttcttccgctgctccgccgacatcgcctccgaccggggtgtgcggggggggggtcttcttcttcttcttcaggggcggcagtgggggggggtggttggcagtctctctcccccccgtgcggtgcgtgcgtgtgcctgtgtcttttcgcctctccgcgccgatcgggtagatcctggcggccgcgtcggtagccgcgctccgtgtggacgatcgccccgtcgcctggctgatatagtcctcggggcgcgcggggcggggggaaaggaggaggacgcggaggaggagcgatcgacgccgccgcgccccggctcgccggggttccgcccccaggtggaaccgcattatgcgcggccccgccccgacgcccgcgcgtccgcgtccgtggcggcggcccgttggtcgcgccgccgccgctccgcccgcgcggcatctcattagcgcccggcgcgggcggcttccgcttccgcccgcgatgctaatgagaccctcgtcgcgggcgggctcgctcccctgcccttccgggttcgtggtaatgagatgccggccccgcgctcccgttggcccccgccggccccaaaggggccggcgaggtcgccccgttggtccgcgggcggctccgccccaaagggggcggggccgcagggtaaaagaagtgagaacgcgaagcgttcgcacttcgtcctaatagtatatatattattagggcaaagtgcgagcgctggcgccctgcccggggcccgcgtcatcccgcgctccgccccaaagggggcggggccgcagggtaaaagaagtgagaacgcgaagcgttcgcacttcgtcctaatagtatatatattattagggcaaagtgcgagcactggcgccctgcccggggcccgcgtcatcccgcgggctccgccccgaggcgggcccggacggggggcgggccgttcctcgcgcacataaagggccggcgtcccggtcgccgccgcaccaggggcacaccggctgcgcggcggagaccgggacggcagcggcggcatcgcgaagggggccacagcgagacagagacgccggcggcgagcggggcaccgacgcacccggatcggatcggatacagagacgcgggcgcatcggttccttttcgttctgcctttccctcccccccccccccccccaccctgtacgtaccgcgaggacccatccacccactgcagccttatcgcaggtacggtgacccggggggccggccggggggacgggcgggggacggggggacgggccggggggacgggccggggggacgggccggggggacgggccggggggacgggccggggggacgggccggggggacgggccggggggacgggccggggggacgggccggggggccggggggccggggggccggggggccggggggacggggggacggggggacggggggacggggggacggggggacggggggacggggggacggggggacggggggacggggggacggggggacggggggacggggggacggggggacggggggacggggggacgggccggggggacggggggacgggccggggggacggggggacgggccggggggacggggggacgggccggggggacggggggacgggccggggggacggggccccgatcccaacatccgcgctttctcgcaggccgggcgccgccttcgtggacgggacaccggtgtggtaactggcgacaaggcgttgccactatggcagacatccccccggacccgcccgcgctcaacacgacgcctgcgaatcatgctcccccatccccacccccgggttcacggaagcgcagacgccccgtcctccccagctcgtcggaatctgagggtaagcccgacacagaatcggaatcctcctcgaccgagtcgtccgaggatgaggcgggagacctacgcggcgggcgccgtcgctccccgcgggagctcggggggaggtattttttggatctgtcggcagaatcgaccacggggacggaatcggagggaacggggccgtcggacgacgatgatgatgatgcgtcagacggctggttggttgacacacccccccgcaaatccaagcgaccccgaatcaacctgcgattaacgagctcccccgaccggcgtgcgggtgtggttttccccgaggtgtggagaagcgacagacctatccgcgcggcgcaaccccaggccccggccagtcttccggggatcgcgcacgcgcaccggcgctctgctcgccaggcccagatgcggagcggagccgcctggacgcttgatctgcattacatacgccagtgcgtcaaccagctctttcggatcctgcgtgccgccccgaacccgcccggcagcgccaaccgcctgcgccacctggtgcgagactgctacctcatgggctactgccggacccgcctggggccgcgcacgtggggccgcctgctgcagatctcgggcggaacctgggacgtgcgcctgcgaaacgcaatccgggaggtcgaggcgcattttgaacccgccgccgagcccgtgtgcgagctgccctgtctgaacgccaggcgttacggccccgagtgtgatgttggcaatctcgagaccaacggcggctcgacgagcgatgatgagatatcggatgcgacggactcggacgataccctcgcgtcccattccgacacggagggggggccctccccggccggccgggagaacccggaatccgcgtccggcggggctatcgcggctcggctggagtgtgagtttgggacgtttgactggacgtccgaggagggctcccagccctggctgtccgcggtggtcgccgataccagctccgccgaacgctctggcctacccgccccgggcgcgtgtcgcgcaacggaagccccagaacgcgaggacgggtgccgaaaaatgcgcttccccgccgcctgcccctatccctgcggccacacatttctccggccatgagcgcgggacccccagcccggtgtgtttgccaaacgaaaaataaacgccctacaagaaagcttttgtgtctgagtgtctggtttttctgggggtggaggaaggaacgacaaaaaaaagaaacaaacgcgacaccgctcgtacgtgtaatggggccgcagtgttttttattagcatcggggggggttagaggttggtgattggatagcaaacgtgggatgacggaggccactcgtcgccaacggccagcgggggcccggggttctgggggtcatcgtcccccgtctgccaggagggctcatcgggaatctcgggtcgccccatgcacgtaaaacacgggcgctgcgtggggtgggtcgccggatgcgggcgggatgatgcggggcggggtttgttgtgaggagccacgagggaccgtagccagcgaagacagctgcgttcccggtcgccgggcaccaccacgccgtattggtattcgtatcggctaaggagattttccagggggtgattaggcgctgcggggaacggggtccacgacacggtccgctcgggcaaaaaccgatcgggcaggggccacggttcccccacccacgcgtcgttggtcttcgtggcgatgaagcgaaaccccagccgggttttttgtgcgtactcgaaaaacggcacacacaggtccgccgccccgaccacccacaggtggtatagccggtgggggccggggcgctcttgatgcaggagccgaaaacacgcaggggcatccagaatctcgatgctttccagggggtcgtcctccgcaaacaggcccgtcgtggtgtttgggggacagcgacaggagcgggttcgcacgatcggtcgggtgaatttgggcaagtccatcagaggctcggccagcctgcgaaggttcgccgggcgaaccaccaccggggttcccagaggctcggaggccaggatccggcattgccgaagcagaaaactccacagagccgggcttgcgtcagcggaagtccgcggcagggcgtttcgttggtctaggagggtaaccacacttacaacaacaacgcccatgtcggtatattaggcccgtggtccgatcttcactcactcgcctgtctgcggacctatgcacggcgggacggcgcgcggacccgggggggctgcttgctatcacacggcccgttcgcacgttcgattttttcagccttgtttggttggctaggtatcccggataatctgacgttccggatatagggggcggggggtagtggggggtgtgtcgacaaactgccgcttcttaaaacaccggggcccgtcgctcggggtgctcgttggttggcacgcgcgacgcggcaaatggcctgtcgtaagttctgtggggtctaccgtagacccgacaagagacaggaggcgtccgtcccgccggagacaaacacggccccggccttcccggcgagcaccttttatacccccgcggaggatgcgtacctggcccccgggcccccggaaaccatccacccttcccgcccaccgtcccccggcgaggctgcgcgcctgtgtcagctgcaggagatcttggcccagatgcacagcgacgaggactaccccatcgtggacgccgcgggtgcggaggaggaagacgaggccgacgatgacgccccggatgacgtggcctacccggaggactacgcggaggggcgttttctgtccatggtttcggccgcccccctgcccggagccagcggccatcctcctgttccgggccgcgcagccccccccgacgtccggacctgcgacacgggtaaggtgggggccacggggttcaccccggaagagctcgacaccatggaccgggaggcacttcgggccatcagccgcgggtgcaagcccccttcgaccctggcaaaactggtgaccgggctgggattcgcgatccacggagcgctcatcccggggtcggaggggtgtgtctttgatagcagccacccgaactaccctcatcgggtaatcgtcaaggcggggtggtacgccagcacgagccacgaggcgcggctgctgagacgcctgaaccaccccgcgatcctacccctcctggacctgcacgtcgtttctggggtcacgtgtctggtcctccccaagtatcactgcgacctgtatacctatctgagcaagcgcccgtctccgttgggccacctacagataaccgcggtctcccggcagctcttgagcgccatcgactacgtccactgcaaaggcatcatccaccgcgatattaagaccgagaacatcttcatcaacacccccgagaacatctgtctgggggactttggggcggcgtgctttgtgcgcgggtgtcgatcgagccccttccattacgggatcgcaggcaccatcgatacaaacgcccccgaggtcctggccggggatccgtacacccaggtaatcgacatctggagcgccggcctggtgatctttgagaccgccgtccacaccgcgtccttgttctcggccccgcgcgaccccgaaaggcggccgtgcgacaaccagatcgcgcgcatcatccgacaggcccaggtacacgtcgacgagtttccgacgcacgcggaatcgcgcctcaccgcgcactaccgctcgcgggcggccgggaacaatcgtccggcgtggacccgaccggcgtggacccgctactacaagatccacacagacgtcgaatatctcatatgcaaagcccttacctttgacgcggcgctccgcccaagcgccgcggagttgctgcgcctgccgctatttcaccctaagtgaccccgctccccccggggggcgtggaggggggggctggttggatgtttttgcacaaaaagacgcggccctcgggctttggtgtttttggcaccttgccgcccggcgtcatgcacgccatcgctcccaggttgcttcttctttttgttctttctggtcttccggggacacgcggcgggtcgggtgtccccggaccaattaatccccccaacagcgatgttgttttcccgggaggttcccccgtggctcaatattgttatgcctatccccggttggacgatcccgggcccttgggttccgcggacgccgggcggcaagacctgccccggcgcgtcgtccgtcacgagcccctgggccgctcgttcctcacgggggggctggttttgctggcgccgccggtacgcggatttggcgcacccaacgcaacgtatgcggcccgtgtgacgtactaccggctcacccgcgcctgccgtcagcccatcctccttcggcagtatggagggtgtcgcggcggcgagccgccgtccccaaagacgtgcgggtcgtacacgtacacgtaccagggcggcgggcctccgacccggtacgctctcgtaaatgcttccctgctggtgccgatctgggaccgcgccgcggagacattcgagtaccagatcgaactcggcggcgagctgcacgtgggtctgttgtgggtagaggtgggcggggagggccccggccccaccgcccccccacaggcggcgcgtgcggagggcggcccgtgcgtccccccggtccccgcgggccgcccgtggcgctcggtgcccccggtatggtattccgcccccaaccccgggtttcgtggcctgcgtttccgggagcgctgtctgcccccacagacgcccgccgcccccagcgacctaccacgcgtcgcttttgctccccagagcctgctggtggggattacgggccgcacgtttattcggatggcacgacccacggaagacgtcggggtcctgccgccccattgggcccccggggccctagatgacggtccgtacgcccccttcccaccccgcccgcggtttcgacgcgccctgcggacagaccccgagggggtcgaccccgacgttcgggccccccgaaccgggcggcgcctcatggccttgaccgaggacacgtcctccgattcgcctacgtccgctccggagaagacgcccctccctgtgtcggccaccgccatggcaccctcagtcgacccaagcgcggaaccgaccgcccccgcaaccactactccccccgacgagatggccacacaagccgcaacggtcgccgttacgccggaggaaacggcagtcgcctccccgcccgcgactgcatccgtggagtcgtcgccactccccgccgcggcggcggcaacgcccggggccgggcacacgaacaccagcagcgcctccgcagcgaaaacgccccccaccacaccagcccccacgacccccccgcccacgtctacccacgcgaccccccgccccacgactccggggccccaaacaacccctcccggacccgcaaccccgggtccggtgggcgcctccgccgcgcccacggccgattcccccctcaccgcctcgccccccgctaccgcgccggggccctcggccgccaacgtttcggtcgccgcgaccaccgccacgcccggaacccggggcaccgcccgtacccccccaacggacccaaagacgcacccacacggacccgcggacgctccccccggctcgccagcccccccaccccccgaacatcgcggcggacccgaggagtttgagggcgccggggacggcgaaccccccgaggacgacgacagcgccaccggcctcgccttccgaactccgaaccccaacaaaccaccccccgcgcgccccgggcccatccgccccacgctcccgccaggaattcttgggccgctcgcccccaacacgcctcgcccccccgcccaagctcccgctaaggacatgccctcgggccccacaccccaacacatccccctgttctggttcctaacggcctcccctgctctagatatcctctttatcatcagcaccaccatccacacggcggcgttcgtttgtctggtcgccttggcagcacaactttggcgcggccgggcggggcgcaggcgatacgcgcacccgagcgtgcgttacgtatgtctgccacccgagcgggattagggggtgggggtggggggcgagaaacgatgaaggacgggaaagggaacagcgaccaaatgtcacgataagaacaataaacctgtgacgtcaatcagatatgtgagtttggttgtgttttgtgggactgggggcggggggtgggaggtatcagtgggtgacagagtcttttaaaagacgtgtcccggggccctcgagatgcgcaacttttggccacacagagaaaggcccccagacgaagtcacccgggtccccgaacaaaaacaaaaaccttgaccgccgccggggggcgtgcctgttgttttggtctcaatggatcggtatgccgttcggacctgggggattgtgggaatcctcgggtgtgctgctgttggggccgcacccaccggccccgcgtccgatacaacaaacgcgaccgcacgcctccccacgcaccccccactcatccgttccgggggctttgccgtccccctcatcgtgggggggctgtgtctcatgattctggggatggcgtgtctactcgaggtcctgcgtcgcctgggtcgcgagttggcgaggtgctgcccccacgcgggccaatttgccccatgatttttcgcctttctggccttgcccccaccccatcgccccgattgtgtgtcgggtgcccggggtacagcagctatggagcggtcggtaatataactttggttgtcgccacacgccccgtgccgggcatgggttgtgcgggaaggacgaaataatccggcgatccccaagcgtaccaactgggggggggggggggggggaaaagaaactaaaaacacatcaagcccacaacccatcccacaatgggggttatggcggacccaccgcaccaccatactccgattcgaccacatatgcaaccaaatcacccccagaggggaggttccatttttacgaggaggaggagtataatagagtctttgtgtttaaaacccggggtcggtgtggtgttcggtcataagctgcattgcgaacgactagtcgccgtttttcgtgtgcatcgcgtatcacggcatggggcgtttgacctccggcgtcgggacggcggccctgctagttgtcgcggtgggactccgcgtcgtctgcgccaaatacgccttagcagacccctcgcttaagatggccgatcccaatcgatttcgcgggaagaaccttccggttttggaccagctgaccgacccccccggggtgaagcgtgtttaccacattcagccgagcctggaggacccgttccagccccccagcatcccgatcactgtgtactacgcagtgctggaacgtgcctgccgcagcgtgctcctacatgccccatcggaggccccccagatcgtgcgcggggcttcggacgaggcccgaaagcacacgtacaacctgaccatcgcctggtatcgcatgggagacaattgcgctatccccatcacggttatggaatacaccgagtgcccctacaacaagtcgttgggggtctgccccatccgaacgcagccccgctggagctactatgacagctttagcgccgtcagcgaggataacctgggattcctgatgcacgcccccgccttcgagaccgcgggtacgtacctgcggctagtgaagataaacgactggacggagatcacacaatttatcctggagcaccgggcccgcgcctcctgcaagtacgctctccccctgcgcatccccccggcagcgtgcctcacctcgaaggcctaccaacagggcgtgacggtcgacagcatcgggatgctaccccgctttatccccgaaaaccagcgcaccgtcgccctatacagcttaaaaatcgccgggtggcacggccccaagcccccgtacaccagcaccctgctgccgccggagctgtccgacaccaccaacgccacgcaacccgaactcgttccggaagaccccgaggactcggccctcttagaggatcccgccgggacggtgtcttcgcagatccccccaaactggcacatcccgtcgatccaggacgtcgcgccgcaccacgcccccgccgcccccagcaacccgggcctgatcatcggcgcgctggccggcagtaccctggcggtgctggtcatcggcggtattgcgttttgggtacgccgccgcgctcagatggcccccaagcgcctacgtctcccccacatccgggatgacgacgcgcccccctcgcaccagccattgttttactagaggagtttccccgctcccgtgtacctctgggcccgtgtgggagggtggctggggtatttgggtgggacttggactccgcataaagggagtctcgaaggagggaaactaggacagttcataggccgggagcgtggggcgcgcaccgctgtcccgacgattagccaccgcgcccacagccacctcgacccgtccgatcccggtatgcccggccgctcgctgcagggcctggcgatcctgggcctgtgggtctgcgccaccggcctggtcgtccgcggccccacggtcagtctggtctcagactcactcgtggatgccggggccgtggggccccagggcttcgtggaagaggacctgcgtgttttcggggagcttcattttgtgggggcccaggtcccccatacaaactactacgacggcatcatcgagctgtttcactaccccctggggaaccactgcccccgcgttgtacacgtggtcacactgaccgcatgcccccgccgccccgccgtggcgttcaccttgtgtcgctcgacgcaccacgcccacagccccgcctatccgaccctggagctgggtctggcgcggcagccgcttctgcgggttcgaacggcaacgcgcgactatgccggtctgtatgtcctgcgcgtatgggtcggcagcgcgacgaacgccagccggtttgttttgggggtggcgctctctgccaacgggacgtttgtgtataacggctcggactacggctcctgcgatccggcgcagcttcccttttcggccccgcgcctgggaccctcgagcgtatacacccccggagcctcccgacccacccctccacggacaacgacacccccgtcctccccccgagacccgacccccgcccccggggacacagggacgcccgcgcccgcgagcggcgagatagccccgcccaattccacgcgatcggccagcgaatcgagacacaggctaaccgtagcccaggtaatccagatcgccataccggcgtccatcatcgcctttgtgtttctgggcagctgtatctgcttcatccatagatgccagcgccgatacaggcgcccccgcggccagatttacaaccccgggggcgtttcctgcgcggtcaacgaggcggccatggcccgcctcggagccgagctgcgatcccacccaaacaccccccccaaaccccgacgccgttcgtcgtcgtccacgaccatgccttccctaacgtcgatagctgaggaatcggagccaggtccagtcgtgctgctgtccgtcagtcctcggccccgcagtggcccgacggccccccaagaggtctaggtccaagcgggccgttcggcaggcccgccccaccgcccccatcgtggttatttccccccccccccccccaataaaccgatgttatttgcctatatgcgtgtgttggatccctttgtgatcgttcgtcattccccggatggcatgggaggcgggtaatggatgggcggggcccggggggaggaaaaagaataaagggggtagtgtcggagaggcccgccgcgcatttaaggagtcgccgccccgactctgtgtcttcgggtgacttggtgcgccgccgtcagctagtctccgatctgccccgaccgacggctcctgccacccgaacatggctcgcggggccgggttggtgttttttgttggagtttgggtcgtatcgtgcctggcggcagcacccagaacgtcctggaaacgggtaacctcgggcgaggacgtggtgttgcttccggcgcccgcggaacgcacccgggcccacaaactactgtgggccgcggaacccctggatgcctgcggtcccctgcgcccgtcgtgggtggcgctgtggcccccccgacgggtgctcgagacggtcgtggatgcggcgtgcatgcgcgccccggaaccgctcgccatagcatacagtcccccgttccccgcgggcgacgagggactgtattcggagttggcgtggcgcgatcgcgtagccgtggtcaacgagagtctggtcatctacggggccctggagacggacagcggtctgtacaccctgtccgtggtcggcctaagcgacgaggcgcgccaagtggcgtcggtggttctggtcgtggagcccgcccctgtgccgaccccgacccccgacgactacgacgaagaagacgacgcgggcgtgacgaacgcacgccggtcagcgttccccccccaaccccccccccgtcgtccccccgtcgcccccccgacgcaccctcgtgttatccccgaggtgtcccacgtgcgcggggtaacggtccatatggagaccctggaggccattctgtttgcccccggggagacgtttgggacgaacgtctccatccacgccattgcccacgacgacggtccgtacgccatggacgtcgtctggatgcggtttgacgtgccgtcctcgtgcgccgatatgcggatctacgaagcttgtctgtatcacccgcagcttccagagtgtctatctccggccgacgcgccgtgcgccgtaagttcctgggcgtaccgcctggcggtccgcagctacgccggctgttccaggactacgcccccgccgcgatgttttgccgaggctcgcatggaaccggtcccggggttggcgtggctggcctccaccgtcaatctggaattccagcacgcctccccccagcacgccggcctctacctgtgcgtggtgtacgtggacgatcatatccacgcctggggccacatgaccatcagcaccgcggcgcagtaccggaacgcggtggtggaacagcacctcccccagcgccagcccgagcccgtcgagcccacccgcccgcacgtgagagccccccatcccgcgccctccgcgcgcggcccgctgcgcctcggggcggtgctgggggcggccctgttgctggccgccctcgggctgtccgcgtgggcgtgcatgacctgctggcgcaggcgctcctggcgggcggttaaaagccgggcctcggcgacgggccccacttacattcgcgtggcggacagcgagctgtacgcggactggagttcggacagcgagggggagcgcgacgggtccctgtggcaggaccctccggagagacccgactctccctccacaaatggatccggctttgagatcttatcaccaacggctccgtctgtatacccccatagcgaggggcgtaaatctcgccgcccgctcaccacctttggttcgggaagcccgggccgtcgtcactcccaggcctcctatccgtccgtcctctggtaaggcgtcttccgacgacgcggacgtcggcgatgaactgattgccatcgcggacgcacgcggggacccgccagagaccctgccccccggcgcgggcggcgccgcgcccgcgtgccgcagaccacctcgcggcggctcccccgcggcctttcccgtggccctccacgccgtggacgccccctcccaattcgtcacctggctcgccgtgcgctggctgcggggggcggtgggtctcggggccgtcctgtgcgggattgcgttttacgtgacgtcaatcgcccgaggcgcataaaggtccggcggccaccccgccgcagctcataaaaatcgtgagtcacggcaaccccaccttcgcctccgccctccgccagcgcccttccgcgtccgcgatgacctcccggcccgccgaccaagactcggtgcgttccagcgcgtcggtgccgctttaccccgcggcctcgcccgtcccggcagaagcctactactcggaaagcgaagacgaggccgccaacgacttcctcgtgcgcatgggccgccagcagtcggtcctaaggcgccgacggcggcgcacgcggtgcgtcgggctggttatcgcctgtctcgtcgtggccctcctatctggagggttcggggcacttttggtgtggctgctccgctaaatgacgcctcgatgtatggcgccttcttcgcccccacccctcgccgcgacccacgtccgtatgttaattgcaataaagtggttgattgtcattacggtctactaggttgtcttttttttttgggggggggggaggaaatgcagaaaagggtaagaaattctcggaatttcacccccgggggggggcaagtgcagtaacccagttcctcagtgtttgggaaatctattgaactctcccggctcctccgtgttagggaagtctcttggggaaatctattgacctctcgcccccccccccccaggaggggggcagtgcagtaccccagttcctccgtgctggggaaatctctctgccgggtacgggctccagacgaaggacccatacatttccccatccgcaccccacatctggcgttctagagtcacgacgcatttgcccccgtccccgcagcaacacacaaagcgatttcaattttcacgattttattattaattacaccaaccaccctgtccccgggacgtggtcaggaccgggggtccgcacccaaacgcacgaaacaaatgctggcagtgtgccgaatataaccccgcgtaggaacacgtcgacgcgtgcgccaaacagcaccagaaggcgcatgccatcagcaggtcgtgcatatggcgatgtgtttggacgcagggcgcagccgcggcgataaaattcatggcggccgtccgccagggccacagcggcgaggactccctgttggcccgaagccattgggtatgaaccagctgcgcctcctgtccgaccctggctcccgccagcgggggcggtgggtcgtgggtgttgagagcacacaggcgggacacctcgatcaccgtccgaaaaaaggcccggtggtccgcgggcagcatctgcaggtgcgccagggcctgggcgttgagagggtacaactcggagccgggggactccgggggccggtccgcgcggtgccgcgagttggcacgctttggggcccgggtgtcggacgcgggcgcgttatggatcccgacgcggggcagaacgtacgtgcgttggcgcggcgatgaggggtccgggctgccgaggggggcgtaggggaccgggctaggcaagcccgcgggttgcgcggggttcccgtgggggtctaggctccctgggcacccgtgggggtcgtgggggtcgcgggtccctgggtatgcgcgggaccctgggttctctgggagatcgtggaactcgcggttccctgggctctcggggaacccggggctccctggggacacgtggtgccctgggaattcttgatggtcggacggcttcagatggcttcgggatcgagagggccgcacagactcgtagtagacccgaatctccacgtttccccgccgccggatcatggtcgccgccccggtgcgggggcccgtcggtcggaagcgagtgcccttcaagcgtgtccgctcctctgggctgcatgccgtcggatggggtgccttttaaggaaaggtctcggctgcccgccccaaccggggtttgggggtgggccggggaaaccccggatgccatgggggggtcacaccctaagcgccggcgcgctggttgggtgggggtagaggggagtccccggtcgacgagatcgtatcaaggggccagcacgcgatcctgccgctcgttcgatctagcacacccacgggtctgctgtgtgggatttcgactcgcgggatccgatcgcacgtccggaggacacagcagcgggagctccgggtcggtcaccgcagttctggccgcctctcggtcctcccgttcccttttatggatctccgcgcagacatcgccatacgtccggtgtgtgcaccgcgaagaatccagaaacatgtccgtcgttttcagggcccaagacatggtgtcccgtccacgaaggcggcgcccggcctgcgagaaagcgcggatgttgggatcggggccccgtccccccggcccgtccccccgtccccccggcccgtccccccgtccccccggcccgtccccccgtccccccggcccgtccccccgtccccccggcccgtccccccgtccccccgtccccccgtccccccgtccccccgtccccccgtccccccgtccccccgtccccccgtccccccgtccccccgtccccccgtccccccgtccccccgtccccccgtccccccgtccccccggccccccggccccccggccccccggccccccggcccgtccccccggcccgtccccccggcccgtccccccggcccgtccccccggcccgtccccccggcccgtccccccggcccgtccccccggcccgtccccccggcccgtccccccgtcccccgcccgtccccccggccggccccccgggtcaccgtacctgcgataaggctgcagtgggtggatgggtcctcgcggtacgtacagggtgggggggggggggggggagggaaaggcagaacgaaaaggaaccgatgcgcccgcgtctctgtatccgatccgatccgggtgcgtcggtgccccgctcgccgccggcgtctctgtctcgctgtggcccccttcgcgatgccgccgctgccgtcccggtctccgccgcgcagccggtgtgcccctggtgcggcggcgaccgggacgccggccctttatgtgcgcgaggaacggcccgccccccgtccgggcccgcctcggggcggagcccgcgggatgacgcgggccccgggcagggcgccagtgctcgcactttgccctaataatatatatactattaggacgaagtgcgaacgcttcgcgttctcacttcttttaccctgcggccccgccccctttggggcggagcgcgggatgacgcgggccccgggcagggcgccagcgctcgcactttgccctaataatatatatactattaggacgaagtgcgaacgcttcgcgttctcacttcttttaccctgcggccccgccccctttggggcggagccgcccgcggaccaacggggcgacctcgccggcccctttggggccggcgggggccaacgggagcgcggggccggcatctcattaccacgaacccggaagggcaggggagcgagcccgcccgcgacgagggtctcattagcatcgcgggcggaagcggaagccgcccgcgccgggcgctaatgagatgccgcgcgggcggagcggcggcggcgcgaccaacgggccgccgccacggacgcggacgcgcgggcgtcggggcggggccgcgcataatgcggttccacctgggggcggaaccccggcgagccggggcgcggcggcgtcgatcgctcctcctccgcgtcctcctcctttccccccgccccgcgcgccccgaggactatatcagccaggcgacggggcgatcgtccacacggagcgcggctaccgacgcggccgccaggatctacccgatcggcgcggagaggcgaaaagacacaggcacacgcacgcaccgcacgggggggagagagactgccaaccacccccccccactgccgcccctgaagaagaagaagaagaccccccccccgcacaccccggtcggaggcgatgtcggcggagcagcggaagaagaagaagacgacgacgacgacgcagggccgcggggccgaggtcgcgatggcggacgaggacgggggacgtctccgggccgcggcggagacgaccggcggccccggatctccggatccagccgacggaccgccgcccaccccgaacccggaccgtcgccccgccgcgcggcccgggttcgggtggcacggtgggccggaggagaacgaagacgaggccgacgacgccgccgccgatgccgatgccgacgaggcggccccggcgtccggggaggccgtcgacgagcctgccgcggacggcgtcgtctcgccgcggcagctggccctgctggcctcgatggtggacgaggccgttcgcacgatcccgtcgccccccccggagcgcgacggcgcgcaagaagaagcggcccgctcgccttctccgccgcggaccccctccatgcgcgccgattatggcgaggagaacgacgacgacgacgacgacgacgatgacgacgaccgcgacgcgggccgctgggtccgcggaccggagacgacgtccgcggtccgcggggcgtacccggaccccatggccagcctgtcgccgcgacccccggcgccccgccgacaccaccaccaccaccaccaccgccgccggcgcgccccccgccggcgctcggccgcctctgactcatcaaaatccggatcctcgtcgtcggcgtcctccgcctcctcctccgcctcctcctcctcgtctgcatccgcctcctcgtctgacgacgacgacgacgacgacgccgcccgcgcccccgccagcgccgcagaccacgccgcgggcgggaccctcggcgcggacgacgaggaggcgggggtgcccgcgagggccccgggggcggcgccccggccgagcccgcccagggccgagcccgccccggcccggacccccgcggcgaccgcgggccgcctggagcgccgccgggcccgcgcggcggtggccggccgcgacgccacgggccgcttcacggccgggcggccccggcgggtcgagctggacgccgacgcggcctccggcgccttctacgcgcgctaccgcgacgggtacgtcagcggggagccgtggcccggggccggccccccgcccccggggcgcgtgctgtacggcgggctgggcgacagccgccccggcctctggggggcgcccgaggcggaggaggcgcgggcccggttcgaggcctcgggcgccccggcgcccgtgtgggcgcccgagctgggcgacgcggcgcagcagtacgccctgatcacgcggctgctgtacacgccggacgcggaggcgatggggtggctccagaacccgcgcgtggcgcccggggacgtggcgctggaccaggcctgcttccggatctcgggcgcggcgcgcaacagcagctccttcatctccggcagcgtggcgcgggccgtgccccacctggggtacgccatggcggcgggccgcttcggctggggcctggcgcacgtggcggccgccgtggccatgagccgccgctacgaccgcgcgcagaagggcttcctgctgaccagcctgcgccgcgcctacgcgcccctgctggcgcgcgagaacgcggcgctgaccggggcgcgaacccccgacgacggcggcgacgccaaccgccacgacggcgacgacgcccgcgggaagcccgccgccgccgccgccccgttgccgtcggcggcggcgtcgccggccgacgagcgcgcggtgcccgccggctacggcgccgcgggggtgctcgccgccctggggcgcctgagcgccgcgcccgcctccgcgccggccggggccgacgacgacgacgacgacgacggcgccggcggtggtggcggcggccggcgcgcggaggcgggccgcgtggccgtggagtgcctggccgcctgccgcgggatcctggaggcgctggcggagggcttcgacggcgacctggcggccgtgccggggctggccggagcccggcccgccgcgcccccgcgcccggggcccgcgggcgcggccgccccgccgcacgccgacgcgccccgcctgcgcgcctggctgcgcgagctgcggttcgtgcgcgacgcgctggtgctgatgcgcctgcgcggggacctgcgcgtggccggcggcagcgaggccgccgtggccgccgtgcgcgccgtgagcctggtcgccggggccctgggcccggcgctgccgcggagcccgcgcctgctgagctccgccgccgccgccgccgcggacctgctcttccagaaccagagcctgcgccccctgctggccgacaccgtcgccgcggccgactcgctcgccgcgcccgcctccgcgccgcgggaggcgcgcaagcgcaagagccccgccccggccagggcgccgccgggcggcgccccgcgccccccgaagaagagccgcgcggacgccccccgccccgcggccgcccctcccgcgggggccgcgccccccgccccgccgacgccgccgccgcggccgccgcgccccgcggcgctgacccgccggcccgccgagggccccgacccgcagggcggctggcgccgccagccgccggggcccagccacacgccggcgccctcggccgccgccctggaggcctactgcgccccgcgggccgtggccgagctcacggaccacccgctcttccccgcgccgtggcgcccggccctcatgttcgacccgcgcgcgctggcctcgctggccgcgcgctgcgccgccccgccccccggcggcgcgcccgccgccttcggcccgctgcgcgcctcgggcccgctgcgccgcgcggcggcctggatgcgccaggtgcccgacccggaggacgtgcgcgtggtgatcctctactcgccgctgccgggcgaggacctggccgcgggccgcgccgggggcgggccccccccggagtggtccgccgagcgcggcgggctgtcctgcctgctggcggccctgggcaaccggctctgcgggcccgccacggccgcctgggcgggcaactggaccggcgcccccgacgtctcggcgctgggcgcgcagggcgtgctgctgctgtccacgcgggacctggccttcgccggcgccgtggagttcctggggctgctggccggcgcctgcgaccgccgcctcatcgtcgtcaacgccgtgcgcgccgcggactggcccgccgacgggcccgtggtctcgcggcagcacgcctacctggcctgcgaggtgctgcccgccgtgcagtgcgccgtgcgctggccggcggcgcgggacctgcgccgcaccgtgctggcctccggccgcgtgttcgggccgggggtcttcgcgcgcgtggaggccgcgcacgcgcgcctgtaccccgacgcgccgccgctgcgcctctgccgcggggccaacgtgcggtaccgcgtgcgcacgcgcttcggccccgacacgctggtgcccatgtccccgcgcgagtaccgccgcgccgtgctcccggcgctggacggccgggccgccgcctcgggcgcgggcgacgccatggcgcccggcgcgccggacttctgcgaggacgaggcgcactcgcaccgcgcctgcgcgcgctggggcctgggcgcgccgctgcggcccgtctacgtggcgctggggcgcgacgccgtgcgcggcggcccggcggagctgcgcgggccgcggcgggagttctgcgcgcgggcgctgctcgagcccgacggcgacgcgcccccgctggtgctgcgcgacgacgcggacgcgggcccgcccccgcagatacgctgggcgtcggccgcgggccgcgcggggacggtgctggccgcggcgggcggcggcgtggaggtggtggggaccgccgcggggctggccacgccgccgaggcgcgagcccgtggacatggacgcggagctggaggacgacgacgacggactgtttggggagtgacggggggggaaacttccgggagcgggggaggggggagatggggagagggggaaggaatcgggcgtctgtgcgcctttaagacagacgcggcgatggccgcgcgcgtgtgtgagaaataaagaacgagacagacgaaaacgtaccgccttgtgtggtttattcgggggtcgggcgggcgggggtcgggcgggcgggggtcgggcgggcgggggtcgggcgggcgggggtcgggcgggcgggggtcgggcgggcgggggtcgggcgggcgggggtcgggcgggcgggggtcgggcgggcgggggtcgggcgggcgggggtcgggcgggcgggggtcgggcgggcgggggtcgggcgggcgggggtcgggcgggcgggggtcgggcgggcgggggtcgggcgggcggcacgtctcccgcgcccgcggggggtctggggctctgacctgagtgcaggttacgaaggtcaggtggcccgagcccccccgcaggagcgggagggaaggcacggggcgcgggagggaggggctgctgcgagctcggggccgcgggcgcggggggaggggcgggggaagcccccggggcggggcgcgggggaggcggccgcgggggaggcggccgcgggaccgcagccccgtggcgcgcgggggggaggggctgccgcgagctcggcgggatggaggggagggagggggtggcggggaaccgtgtgcgggcgggcgggtgcttggtgcaactgtctggtctgcgagggcgagcggtggtgcgactggcgtcttcgggggggcggggagcttgggagtgtgtggtggtctgcggcacagcctgctagtccccgtcctgccgcgcgggggcgggcgcgggaaaaaagccgcgcgggggcgcccgcgggaaggcagccccgcggcgcgcggggggaggggcggcgcccgcgggggagcggccggctccgggggagggacggggaagggggcgcgcggggctgccctgccgcccgcccgccgccgccgcccgccttcgcgcccccccccaaaaaacaccccccccgggggttgactccccgggggaaaagaggcggggcggg

SEQ ID NO: 18 - protein, 28 aa, Homo sapiens
GAIIVRGCSMPGPWRSGRLLVSRRWSVE

SEQ ID NO: 19 - protein, 27 aa, Homo sapiens
GYISRVTAGKDSYIALVDKNIMGYIAS

SEQ ID NO: 20 - protein, 27 aa, Homo sapiens
  misc_feature: CT26-M26
VILPZAPSGPSYATYLQPAQAQMLTPP

SEQ ID NO: 21 - protein, 27 aa, Homo sapiens
  misc_feature: CT26-ME1
LHSGQNHLKEMAISVLEARACAAAGQS

SEQ ID NO: 22 - protein, 27 aa, Homo sapiens
  misc_feature: CT26-ME2 neoantigen
DTLSAMSNPRAMQVLLQIQQGLQTLAT

SEQ ID NO: 23 - protein, 27 aa, Homo sapiens
  misc_feature: CT26-ME20
PLLPFYPPDEALEIGLELNSSALPPTE

SEQ ID NO: 24 - protein, 27 aa, homo sapiens
  misc_feature: CT26-ME37
EVIQTSKYYMRDVIAIESAWLLELAPH

SEQ ID NO: 25 - DNA, 159332 bp, Artificial Sequence
  entire sequence of Synco-4
  misc_feature (102424)..(103863): EGF-PL coding sequence is between nucleotides
cgccagaggcccggcccaccgccgccgccccccggccccggcccccaccgcccggcgtgggcccggggggcggggctgacccctcccaccccccctcgcgccccttccgccttccgccgcgcctcgccctccgcctgcgcgtcaccgcggagcacctggcgcgcctgcgcctgcgacgcgcgggcggggagggggcgccggagccccccgcgacccccgcgacccccgcgacccccgcgacccccgcgacccccgcgcgggtgcgcttctcgccccacgtccgggtgcgccacctggtggtctgggcctcggccgcccgcctggcgcgccgcggctcgtgggcccgcgagcgggccgaccgggctcggttccggcgccgggtggcggaggccgaggcggtcatcgggccgtgcctggggcccgaggcccgtgcccgggccctggcccgcggagccggcccggcgaactcggtctaacgttacacccgaggcggcctgggtcttccgcggagctcccgggagctccgcaccaagccgctctccggagagacgatggcaggagccgcgcatatatacgcttggagccagcccgccctcacagggcgggccgcctcgggggcgggactggccaatcggcggccgccagcgcggcggggcccggccaaccagcgtccgccgagtcttcggggcccggcccattgggcgggagttaccgcccaatgggccgggccgcccacttcccggtatggtaattaaaaacttgcaagaggccttgttccgcttcccggtatggtaattagaaactcattaatgggcggccccggccgcccttcccgcttccggcaattcccgcggcccttaatgggcaaccccggtattccccgcctcccgcgccgcgcgtaaccactcccctggggttccgggttatgctaattgcttttttggcggaacacacggcccctcgcgcattggcccgcgggtcgctcaatgaacccgcattggtcccctggggttccgggtatggtaatgagtttcttcgggaaggcgggaagccccggggcaccgacgcaggccaagcccctgttgcgtcggcgggaggggcatgctaatggggttctttgggggacaccgggttgggcccccaaatcgggggccgggccgtgcatgctaatgatattctttgggggcgccgggttggtccccggggacggggccgccccgcggtgggcctgcctcccctgggacgcgcggccattgggggaatcgtcactgccgcccctttggggaggggaaaggcgtggggtataagttagccctggcccgacagtctggtcgcatttgcacctcggcactcggagcgagacgcagcagccaggcagactcgggccgccccctctccgcatcaccacagaagccccgcctacgttgcgacccccagggaccctccgtccgcgaccctccagccgcatacgacccccatggagccccgccccggagcgagtacccgccggcctgagggccgcccccagcgcgaggtgaggggccgggcgccatgtctggggcgccatattggggggcgccatattggggggcgccatgttgggggacccccgacccttacactggaaccggccgccatgttgggggacccccactcatacacgggagccgggcgccatgttggggcgccatgttagggggcgtggaaccccgtgacactatatatacagggaccgggggcgccatgttagggggtgcggaaccccctgaccctatatatacagggaccggggtcgccctgttgggggtcgccatgtgaccccctgactttatatatacagacccccaacacatacacatggcccctttgactcagacgcagggcccggggtcgccgtgggaccccctgactcatacacagagacacgcccccacaacaaacacacaaggaccggggtcgccgtgttgggggcgtggtccccactgactcatacgcaggccccccttactcacacgcatctaggggggtggggaggagccgcccgccatatttgggggacgccgtgggacccccgactccggtgcgtctggagggcgggagaagagggaagaagaggggtcgggatccaaaggacggacccagaccacctttggttgcagacccctttctcccccctcttccgaggccagcaggggggcaggactttgtgaggcgggggggggagagggggaactcgtgggtgctgattgacgcgggaaatccccccccattcttacccgccccccttttttccccttagcccgccccggatgtctgggtgtttccctgcgaccgagacctgccggacagcagcgactctgaggcggagaccgaagtgggggggcggggggacgccgaccaccatgacgacgactccgcctccgaggcggacagcacggacacggaactgttcgagacggggctgctggggccgcagggcgtggatgggggggcggtctcgggggggagccccccccgcgaggaagaccccggcagttgcgggggcgccccccctcgagaggacggggggagcgacgagggcgacgtgtgcgccgtgtgcacggatgagatcgcgccccacctgcgctgcgacaccttcccgtgcatgcaccgcttctgcatcccgtgcatgaaaacctggatgcaattgcgcaacacctgcccgctgtgcaacgccaagctggtgtacctgatagtgggcgtgacgcccagcgggtcgttcagcaccatcccgatcgtgaacgacccccagacccgcatggaggccgaggaggccgtcagggcgggcacggccgtggactttatctggacgggcaatcagcggttcgccccgcggtacctgaccctgggggggcacacggtgagggccctgtcgcccacccacccggagcccaccacggacgaggatgacgacgacctggacgacggtgaggcggggggcggcaaggaccctgggggaggaggaggaggagggggggggagggaggaataggcgggcgggcgaggaaagggcgggccggggagggggcgtaacctgatcgcgccccccgttgtctcttgcagcagactacgtaccgcccgccccccgccggacgccccgcgcccccccacgcagaggcgccgccgcgccccccgtgacgggcggggcgtctcacgcagccccccagccggccgcggctcggacagcgcccccctcggcgcccatcgggccacacggcagcagtaacaccaacaccaccaccaacagcagcggcggcggcggctcccgccagtcgcgagccgcggcgccgcggggggcgtctggcccctccgggggggttggggttggggttggggttgttgaagcggaggcggggcggccgaggggccggacgggcccccttgtcaacagacccgccccccttgcaaacaacagagaccccatagtgatcagcgactcccccccggcctctccccacaggccccccgcggcgcccatgccaggctccgccccccgccccgggccccccgcgtccgcggccgcgtcgggacccgcgcgcccccgcgcggccgtggccccgtgcgtgcgagcgccgcctccggggcccggcccccgcgccccggcccccggggcggagccggccgcccgccccgcggacgcgcgccgtgtgccccagtcgcactcgtccctggctcaggccgcgaaccaagaacagagtctgtgccgggcgcgtgcgacggtggcgcgcggctcgggggggccgggcgtggagggtgggcacgggccctcccgcggcgccgccccctccggcgccgccccgctcccctccgccgcctctgtcgagcaggaggcggcggtgcgtccgaggaagaggcgcgggtcgggccaggaaaacccctccccccagtccacgcgtccccccctcgcgccggcaggggccaagagggcggcgacgcaccccccctccgactcagggccgggggggcgcggccagggtgggcccgggacccccctgacgtcctcggcggcctccgcctcttcctcctctgcctcttcctcctcggccccgacccccgcgggggccgcctcttccgccgccggggccgcgtcctcctccgcttccgcctcctcgggcggggccgtcggtgccctgggagggagacaagaggaaacctccctcggcccccgcgctgcttctgggccgcgggggccgaggaagtgtgcccggaagacgcgccacgcggagacttccggggccgtccccgcgggcggcctcacgcgctacctgcccatctcgggggtctctagcgtggtcgccctgtcgccttacgtgaacaagactatcacgggggactgcctgcccatcctggacatggagacggggaacatcggggcgtacgtggtcctggtggaccagacgggaaacatggcgacccggctgcgggccgcggtccccggctggagccgccgcaccctgctccccgagaccgcgggtaaccacgtgatgccccccgagtacccgacggcccccgcgtcggagtggaacagcctctggatgacccccgtggggaacatgctgttcgaccagggcaccctagtgggcgccctggacttccgcagcctgcggtctcggcacccgtggtccggggagcagggggcgtcgacccgggacgagggaaaacaataagggacgccccccgtgtttgtggggaggggggggtcgggcgctgggtggtctctggccgcgcccactacaccagccaatccgtgtcggggaggggaaaagtgaaagacacgggcaccacacaccagcgggtcttttgtgttggccctaataaaaaaaaactcaggggatttttgctgtctgttgggaaataaaggtttacttttgtatcttttccctgtctgtgttggatgtatcgcggggatgcgtgggagtgggggtgcgtgggagtgggggtgcgtgggagtgggggtgcgtgggagtgggggtgcgtgggagtgggggtgcgtgggagtgggggtgcgtgggagtgggggtgcgtgggagtgggggtgcgtgggagtgggggtgccatgttgggcaggctctggtgttaaccacagagccgcggcccgggctgcctgaccaccgatccccgaaagcatcctgccactggcatggagccagaaccacagtgggttgggtgtgggtgttaagtttccgcgagcgcctgcccgcccggactgacctggcctctggccgccacaaagggcggggggggttaactacactatagggcaacaaaggatgggaggggtggcggggcgggacggggcgcccaaaagggggtcggccacaccacagacgtgggtgttggggggtggggcggaggggtgggggggggggagacagaaacaggaacatagttagaaaacaagaatgcggtgcagccagagaatcacaggagacgaggggatgggcgtgttggttaccaacccacacccaggcatgctcggtggtatgaaggagggggggcggtgcttcttagagaccgccgggggacgtggggttggtgtgcaaaggcacgcgcacccgcgcggccaggtgggccggtactccatccccccctcccccgacccttcccacccccgcgtgccagagatcaccccggtcccccggcacccgccactcctccgtatcctcgctttaggaacaactttagggggggtacacacgcgccgtgcatttccttccacaccccccctcccccgcactccccccccccaggcagtaagacccaagcatagagagccaggcacaaaaacacaggcggggtgggacacatgccttcttggagtacgtgggtcattggcgtggggggttacagcgacaccggccgaccccctggcggtcttccagccggcccttagataagggggcagttggtggtcggacgggtaagtaacagagtctgactaagggtgggagggggggaaaagaacgggctggtgtgctgtaacacgagcccacccgcgagtggcgtggccgaccttagcctctggggcgccccctgtcgtttgggtcccccccctctattggggagaagcaggtgtctaacctacctggaaacgcggcgtctttgttgaacgacaccggggcgccctcgacgagtgggataacgggggaggaagggagggaggagggtactgggggtgaagaaggggggggggagaagcgagaacaggaaaggcgatggagcccggcagaacaccgaggaaaaaaaaaccacagcgcatgcgccgggccgttgtggggccccgggccggggccccttgggtccgccggggccccgggccgggccgccacgggggccggccgttggcggtaaccccgagtgttcatctcaggccccgggccgggaacccggaaaagcctccggggggcctttttcgcgtcgcgtgccggcgagcgggtccggacggggcccggaccgccgcggtcgggggcccctcgtcccgggccgtacgcggccttcgccccgtgaggggacagacgaacgaaacattccggcgacggaacgaaaaacaccccagacgggttaaagaaacagaaaccgcaacccccaccacccccgaaacggggaaaacgaaaaaacagaccagcggccggccggcgcttagggggaggatgtcgccgacgccccttggccgccccggctgcaggggggcccggagagccgcggcacccggacgcgcccggaaagtctttcgcaccacccgcgatcggcacggccgcgcccccgcttttataaaggctgagatgacgcagcaaaaacaggccacagcaccacgtgggtaggtgatgtaattttattttcctcgtctgcggcctaatggatttccgggcgcggtgcccctgtctgcagagcacttaacggattgatatctcgcgggcacgcgcgcccttaatggaccggcgcggggcggggggccggatacccacacgggcggggggggggtgtcgcgggccgtctgctggcccgcggccacataaacaatgactctgggcctttctgcctctgccgcttgtgagtgcgcgcgccggctctgcggtgtcggcggcggctgcggcggctgcggcggccgccgtgttcggtctcggtagccggccggcgggtggactcgcggggggccggagggtggaaggcaggggggtgtaggatgggtatcaggacttccacttcccgtccttccatcccccgttcccctcggttgttcctcgcctcccccaacaccccgccgctttccgttggggttgttattgttgtcgggatcgtgcgggccgggggtcgccggggcaggggcgggggcgtgggcgggggtgctcgtcgatcgaccgggctcagtgggggcgtggggtgggtgggagaaggcgaggagactggggtgggggtgtcggtgggtggttgttttttgtggttgtttttgtgtctgttcccgtcccccgtcaccccctccctccgtcccctccgtccccccgtcgcgggtgtttgtgtttgtttattccgacattggtttatttaaataaacacagccgttctgcgtgtctgttcttgcgtgtggctgggggcttatatgtggggtcccgggggcgggatggggtttagcggcggggggcggcgcgccggacggggcgctggagataacggcccccggggaacgggggaccggggctgggtatcccgaggtgggtgggtgggcggcggtggccgggccgggccgggccgggccgggccgggtgggcggggtttggaaaaacgaggaggaggaggagaaggcgggggggggggagacggggggaaagcaaggacacggcccggggggtgggagcgcgggccgggccgctcgtaagagccgcgacccggccgccggggagcgttgtcgccgtcggtctgccggcccccgtccctcccttttttgaccaaccagcgccccccccccccctcaccaccattcctactaccaccaccaccaccaccaccgacacctcccgcgcacccccgcccacatccccccccaacccgcaccaccagcacgggttgggggtagcaggggatcaaaggggggcaaagcggcggggcggttcggggggggggggggggggcgggaaaccaagtaggcccgcccatccgcggcccctcccggcagccacgcccccagcgtcgggtgtcacggggaaagagcagaggggagaggggagagggggggagaggggagagggggggagaggggagagggggggagaggggagagggggggagaggggagagggggggagaggggagagggggggagaggggagagggggggagaggggagagggggggagaggggagagggggggagaggggagagggggggagagggggtatataaaccaacgaaaagcgcgggaacggggatacggggcttgtgtggcacgacgtcgtggttgtgttactgggcaaacacttggggactgtaggtttctgtgggtgccgaccctaggcgctatggggattttgggttgggtcgggcttattgccgttggggttttgtgtgtgcgggggggcttgccttcaaccgaatatgttattcggagtcgggtggctcgagaggtgggggatatattaaaggtgccttgtgtgccgctcccgtctgacgatcttgattggcgttacgagaccccctcggctataaactatgctttgatagacggtatatttttgcgttatcactgtcccggattggacacggtcttgtgggataggcatgcccagaaggcatattgggttaacccctttttatttgtggcgggttttttggaggacttgagttaccccgcgtttcctgccaacacccaggaaacagaaacgcgcttggccctttataaagagatacgccaggcgctggacagtcgcaagcaggccgccagccacacacctgtgaaggctgggtgtgtgaactttgactattcgcgcacccgccgctgtgtagggcgacaggatttgggacctaccaacggaacgtctggacggaccccggttctgccgccggacgatgaagcgggcctgcagccgaagcccctcaccacgccgccgcccatcatcgccacgtcggaccccaccccgcgacgggacgccgccacaaaaagcagacgccgacgaccccactcccggcgcctctaacgatgcctcgacggaaacccgtccgggttcggggggcgaaccggccgcctgtcgctcgtcagggccggcggcgctcctcgccgccctagaggctggtcccgctggtgtgacgttttcctcgtccgcgccccccgaccctcccatggatttaacaaacgggggggtgtcgcctgcggcgacctcggcgcctctggactggaccacgtttcggcgtgtgtttctgatcgacgacgcgtggcggcccctgatggagcctgagctggcgaaccccttaaccgcccacctcctggccgaatataatcgtcggtgccagaccgaagaggtgctgccgccgcgggaggatgtgttttcgtggactcgttattgcacccccgacgaggtgcgcgtggttatcatcggccaggacccatatcaccaccccggccaggcgcacggacttgcgtttagcgtgcgcgcgaacgtgccgcctcccccgagtcttcggaatgtcttggcggccgtcaagaactgttatcccgaggcacggatgagcggccacggttgcctggaaaagtgggcgcgggacggcgtcctgttactaaacacgaccctgaccgtcaagcgcggggcggcggcgtcccactctagaatcggttgggaccgtttcgtgggcggagttatccgccggttggccgcgcgccgccccggcctggtgtttatgctctggggcacacacgcccagaatgccatcaggccggaccctcgggtccattgcgtcctcaagttttcgcacccgtcgcccctctccaaggttccgttcggaacctgccagcatttcctcgtggcgaaccgatacctcgagacccggtcgatttcacccatcgactggtcggtttgaaaggcatcgacgtccggggtttttgtcggtgggggcttttgggtatttccgatgaataaagacggttaatggttaaacctctggtctcatacgggtcggtgatgtcgggcgtcgggggagagggagttccctctgcgcttgcgattctagcctcgtggggctggacgttcgacacgccaaaccacgagtcggggatatcgccagatacgactcccgcagattccattcggggtgccgctgtggcctcacctgaccaacctttacacgggggcccggaacgggaggccacagcgccgtctttctccccaacgcgcgcggatgacggcccgccctgtaccgacgggccctacgtgacgtttgataccctgtttatggtgtcgtcgatcgacgaattagggcgtcgccagctcacggacaccatccgcaaggacctgcggttgtcgctggccaagtttagcattgcgtgcaccaagacctcctcgttttcgggaaacgccccgcgccaccacagacgcggggcgttccagcgcggcacgcgggcgccgcgcagcaacaaaagcctccagatgtttgtgttgtgcaaacgcgcccacgccgctcgagtgcgagagcagcttcgggtcgttattcagtcccgcaagccgcgcaagtattacacgcgatcttcggacgggcggctctgccccgccgtccccgtgttcgtccacgagttcgtctcgtccgagccaatgcgcctccaccgagataacgtcatgctggcctcgggggccgagtaaccgccccccccccatgccaccctcactgcccgtcgcgcgtgtttgatgttaataaataacacataaatttggctggttgtttgttgtctttaatggaccgcccgcaagggggggggggcatttcagtgtcgggtgacgagcgcgatccggccgggatcctaggaccccaaaagtttgtctgcgtattccagggcggggctcagttgaatctcccgcagcacctctaccagcaggtccgcggtgggctggagaaactcggccgtcccggggcaggcggttgtcgggggtggaggcgcggcgcccaccccgtgtgccgcgcctggcgtctcctctgggggcgacccgtaaatggttgcagtgatgtaaatggtgtccgcggtccagaccacggtcaaaatgccggccgtggcgctccgggcgctttcgccgcgcgaggagctgacccaggagtcgaacggatacgcgtacatatgggcgtcccacccgcgttcgagcttctggttgctgtcccggcctataaagcggtaggcacaaaattcggcgcgacagtcgataatcaccaacagcccaatgggggtgtgctggataacaacgcctccgcgcggcaggcggtcctggcgctcccggccccgtaccatgatcgcgcgggtgccgtactcaaaaacatgcaccacctgcgcggcgtcgggcagtgcgctggtcagcgaggccctggcgtggcataggctatacgcgatggtcgtctgtggattggacatctcgcggtgggtagtgagtcccccgggccgggttcggtggaactgtaaggggacggcgggttaatagacaatgaccacgttcggatcgcgcagagccgatagtatgtgctcactaatgacgtcatcgcgctcgtggcgctcccggagcggatttaagttcatgcgaaggaattcggaggaggtggtgcgggacatggccacgtacgcgctgttgaggcgcaggttgccgggcgtaaagcagatggcgaccttgtccaggctaaggccctgggagcgcgtgatggtcatggcaagcttggagctgatgccgtagtcggcgtttatggccatggccagctccgtagagtcaatggactcgacaaactcgctgatgttggtgttgacgacggacatgaagccgtgttggtcccgcaagaccacgtaaggcaggggggcctcttccagtaactcggccacgttggccgtcgcgtgccgcctccgcagctcgtccgcaaaggcaaacacccgtgcgtacgtgtatcccatgagcgtataattgtccgtctgcagggcgacggacatcagccccccgcgcggcgagccggtcagcatctcgcagccccggaagataacgttgtccacgtacgtgctaaagggggcgacttcaaatgcctccccgaagagctcttggaggattcggaatctcccgaggaaggcccgcttcagcagcgcaaactgggtgtgaacggcggcggtggtctccggttccccgggggtgtagtggcagtaaaacacgtcgagctgttgttcgtccagccccgcgaaaataacgtcgaggtcgtcgtcgggaaaatcgtccgggcccccgtcccgcggccccagttgcttaaaatcaaacgcacgctcgccgggggcgcctgcgtcggccattaccgacgcctgcgtcggcacccccgaagatttggggcgcagagacagaatctccgccgttagttctcccatgcgggcgtaggcgagggtcctctgggtcgcatccaggcccgggcgctgcagaaagttgtaaaaggagataagcccgctaaatatgagccgcgacaggaacctgtaggcaaactccaccgaagtctccccctgagtctttacaaagctgtcgtcacgcaacactgcctcgaaggcccggaacgtcccactaaacccaaaaaccagttttcgcaggcgcgcggtcaccgcgatctggctgttgaggacgtaagtgacgtcgttgcgggccacgaccagctgctgtttgctgtgcacctcgcagcgcatgtgccccgcgtcctggtcctggctctgcgagtagttggtgatgcggctggcgttggccgtgagccacttttcaatcgtcaggccgggctggtgtgtcagccgtcggtattcgtcaaactccttgaccgacacgaacgtaagcacggggagggtgaacacgacgaactccccctcacgggtcaccttcaggtaggcgtggagcttggccatgtacgcgctcacctctttgtgggaggagaacagccgcgtccagccggggaggttggcggggttggtgatgtagttttccgggacgacgaagcgatccacgaactgcatgtgctcctcggtgatgggcaggccgtactccagcaccttcatgaggttaccgaactcgtgctcgacgcaccgtttgttgttaataaaaatggcccagctatacgagaggcgggcgtactcgcgcagcgtgcggttgcagatgaggtacgtgagcacgttctcgctctggcggacggaacaccgcagtttctggtgctcgaaggtcgactccagggacgccgtctgcgtcggcgagcccacacacaccaacacgggccgcaggcgggccgcgtactggggggtgtggtacagggcgttaatcatccaccagcaatacaccacggccgtgaggaggtgacgcccaaggagcccggcctcgtcgatgacgatcacgttgctgcgggtaaaggccggcagcgccccgtgggtggccggggccaaccgcgtcagggcgccctcggccaaccccagggtccgttccagggcggccagggcgcgaaactcgttccgcaactcctcgcccccggaggcggccagggcgcgcttcgtgaggtccaaaatcacctcccagtagtacgtcagatctcgtcgctgcaggtcctccagcgaggcggggttgctggtcagggtgtacgggtactgtcccagttgggcctggacgtgattcccgcgaaacccaaattcatgaaagatggtgttgatgggtcggctgagaaaggcgcccgagagtttggcgtacatgttttgggccgcaatgcgcgtggcgcccgtcaccacacagtccaagacctcgttgattgtctgcacgcacgtgctctttccggagccagcgttgccggtgataagatacaccgcgaacggaaactccctgaggggcaggcctgcgggggactctaaggccgccacgtcccggaaccactgcagatggggcacttgcgctccgtcgagctgttgttgcgagagctctcggatgcgcttaaggattggctgcaccccgtgcatagacgtaaaatttaaaaaggcctcggccctccctggaacggctggtcggtccccgggttgctgaaggtgcggcgggccgggtttctgtccgtctagctggcgctccccgccggccgccgccatgaccgcaccacgctcgcgggcccccactacgcgtgcgcggggggacacggaagcgctgtgctcccccgaggacggctgggtaaaggttcaccccagccccggtacgatgctgttccgcgagattctccacgggcagctggggtataccgagggccagggggtgtacaacgtcgtccggtccagcgaggcgaccacccggcagctgcaggcggcgatctttcacgcgctcctcaacgccaccacttaccgggacctcgaggcggactggctcggccacgtggcggcccgcggtctgcagccccaacggctggttcgccggtacaggaacgcccgggaggcggatatcgccggggtggccgagcgggtgttcgacacgtggcggaacacgcttaggacgacgctgctggactttgcccacgggttggtcgcctgctttgcgccgggcggcccgagcggcccgtcaagcttccccaaatatatcgactggctgacgtgcctggggctggtccccatattacgcaagcgacaagaagggggtgtgacgcagggtctgagggcgtttctcaagcagcacccgctgacccgccagctggccacggtcgcggaggccgcggagcgcgccggccccgggttttttgagctggcgctggccttcgactccacgcgcgtggcggactacgaccgcgtgtatatctactacaaccaccgccggggcgactggctcgtgcgagaccccatcagcgggcagcgcggagaatgtctggtgctgtggccccccttgtggaccggggaccgtctggtcttcgattcgcccgtccagcggctgtttcccgagatcgtcgcgtgtcactccctccgggaacacgcgcacgtctgccggctgcgcaataccgcgtccgtcaaggtgctgctggggcgcaagagcgacagcgagcgcggggtggccggtgccgcgcgggtcgttaacaaggtgttgggggaggacgacgagaccaaggccgggtcggccgcctcgcgcctcgtgcggcttatcatcaacatgaagggcatgcgccacgtaggcgacattaacgacaccgtgcgttcctacctcgacgaggccggggggcacctgatagacgccccggccgtcgacggtaccctccctggattcggcaagggcggaaacagccgcgggtctgcgggccaggaccagggggggcgggcgccgcagcttcgccaggccttccgcacggccgtggttaacaacatcaacggcgtgttggagggctatataaataacctgtttggaaccatcgagcgcctgcgcgagaccaacgcgggcctggcgacccaattgcaggagcgcgaccgcgagctccggcgcgcaacagcgggggccctggagcgccagcagcgcgcggccgacctggcggccgagtccgtgaccggtggatgcggcagccgccctgcgggggcggacctgctccgggccgactatgacattatcgacgtcagcaagtccatggacgacgacacgtacgtcgccaacagctttcagcacccgtacatcccttcgtacgcccaggacctggagcgcctgtcgcgcctctgggagcacgagctggtgcgctgttttaaaattctgtgtcaccgcaacaaccagggccaagagacgtcgatctcgtactccagcggggcgatcgccgcattcgtcgccccctactttgagtcagtgcttcgggccccccgggtaggcgcgcccatcacgggctccgatgtcatcctgggggaggaggagttatgggatgcggtgtttaagaaaacccgcctgcaaacgtacctgacagacatcgcggccctgttcgtcgcggacgtccagcacgcagcgctgcccccgcccccctccccggtcggcgccgatttccggcccggcgcgtccccgcggggccggtccagatcgcggtcgcccggaagaactgcgcgaggcgcgccggaccagggcgggggcatcgggcaccgggatggccgccgcgacggccgacgatgaggggtcggccgccaccatcctcaagcaggccatcgccggggaccgcagcctggtcgaggcggccgaggcgattagccagcagacgctgctccgcctggcctgcgaggtgcgccaggtcggcgaccgccagccgcggtttaccgccaccagcatcgcgcgcgtcgacgtcgcgcctgggtgccggttgcggttcgttctggacgggagtcccgaggacgcctatgtgacgtcggaggattactttaagcgctgctgcggccagtccagttatcgcggcttcgcggtggcggtcctgacggccaacgaggaccacgtgcacagcctggccgtgccccccctcgttctgctgcaccggttctccctgttcaaccccagggacctcctggactttgagcttgcctgtctgctgatgtacctggagaactgcccccgaagccacgccaccccgtcgacctttgccaaggttctggcgtggctcggggtcgcgggtcgccgcacgtccccattcgaacgcgttcgctgccttttcctccgcagttgccactgggtcctaaacacactcatgttcatggtgtacgtaaaaccgttcgacgacgagttcgtcctgccccactggtacatggcccggtacctgctggccaacaacccgccccccgttctctcggccctgttctgtgccaccccgacgagctcctcattccggctgccggggccgcccccccgctccgactgcgtggcctataaccccgccgggatcatggggagctgctgggcgtcggaggaggtgcgcgcgcctctggtctattggtggctttcggagaccccaaaacgacagacgtcgtcgctgttttatcagttttgttgaattttaggaaataaacccggttttgtttctgtggcctcccgacggatgcgcgtgtccttactccgtcttggtgggtgggtggctgtgtatggcgtcccatctgtgcggggaggggggcaagtcggcacgtattcggacagactcaagcacacacgggggagcgctcttgtctcagggcaatgtttttattggtcaaactcaggcaaacagaaacgacatcttgtcgtcaaagggatacacaaacttccccccctcgccccatactcccgccagcaccccggtaaacaccaactcaatctcgcgcaggatttcgcgcaggtgatgagcgcagtccacgggggggagcacaaggggccgcgggtatagatcgacggggacgccgaccgactccccgcctccgggacagacacgcacgacgcgccgccagtagtgctctgcgtccagcaaggcgccgccgcggaaggcagtggggggcaaggggtcgctggcctcaaagggggacacccgaacgctccagtactccgcgtccaaccgtttattaaacgcgtccaagataaggcggtcgcaggcgtcctccataaggccccgggccgtgagtgcgtcctcctccggcacgcatgccgttgtcaggcccaggacccgtcgcagcgtgtcgcgtacgacccctgccgccgtggtgtacgcgggcccgcggagaggaaatcccccaagatggtcagtgttgtcgcgggagttccagaaccacactcccgcctggctccaggcgactgcgtgggtgtagacgccctcgagggccaggcacagtgggtgccgcagccggacggcgttggccctaagcacggctcccacggccgtctcgatggcccgccgggcgtcctcgatcaccccggaagccgcatccgcgtcttgggggtccacgttaaagacaccccagaacgcacccccatcgcccccgcagaccgcgaacttcaccgagctggccgtctcctcgatctgcaggcagacggcggccattaccccacccaggagctgccgcagcgcagggcaggcgttgcacgtgtccgggaccaggcgctccaagacggccccggcccagggctctgagggagcggccaccaccagcgcgtccagtcttgctaggcccgtccggccgtgggggtccgccagcccgctccccccgaggtcggccagggccgccaggagctgggcgcgaagtccggggaagcaaaaccgcgccgtccagacgggcccgacggccgcgggcgggtctaacagttggatgattttagtggcgggatgccaccgcgccaccgcctcccgcaccgcgggcaggaggcatccggctgccgccgaggccacgccgggccaggctcgcggggggaggacgaccctggcccccaccgcgggccaggcccccaggagcgcggcgtaagcggccgcggccccgcgcaccaggtcccgtgccgactcggccgtggccggcacggtgaacgtgggccaacccggaaaccccaggacggcaaagtacgggacgggtcccccccggacctcaaactcgggccccagaaaggcaaagacgggggccagggccccgggggcggcgtggaccgtggtatgccactgccggaaaagggcgacgagcgccggcgcggagaacttctcgccggcgcttacaaagtagtcgtaatcgcggggcagcagcacccgtgccgtgactcgttgcgggtgcccgcgtggccgcaggcccacctcgcacacctcgaccaggtccccgaacgcgccctccttcttgatcggcggaaacgcaagagtctggtattcgcgcgcaaatagcgcggttccggtggtgatgttaacggtcagcgaagcggcggacgcgcactggggggtgtcgcgaatggccgccaggcgcgcccacgccagccgcgcgtcgggatgctcggcaacgcgcgccgccagggccatagggtcgatgtcaatgttggcctccgcgaccaggagagcggcgcgaggggcggcgggcgggccccacgacgctctctcaactttcaccaccagtcccgtgcgtgggtccgagccgatacgcagcggggcgaacagggccaccggcccggtctggcgctccagggccgccaggacgcacgcgtacagcgcccgccacagagtcgggttctccaggggctccagcggggaggcggccggcgtcgtcgcggcgcgggcggccgccacgacggcctggacggagacgtccgcggagccgtagaaatcccgcagctccgtcgcggtgacggagacctccgcaaagcgcgcgcgaccctcccctgcggcgttgcgacatacaaaatacaccagggcgtggaagtactcgcgagcgcgggggggcagccataccgcgtaaagggtaatggcgctgacgctctcctccacccacacgatatctgcggtgtccatcgcacggcccctaaggatcacgggcggtctgtgggtcccatgctgccgtgcctggccgggcccggtgggtcgcggaaaccggtgacggggggggggcggtttttggggttggggtgggggtgggaaacggcccgggtccgggggccaacttggcccctcggtgcgttccggcaacagcgccgccggtccgcggacgaccacgtaccgaacgagtgcggtcccgagacttatagggtgctaaagttcaccgccccctgcatcatgggccaggcctcggtggggagctccgacagcgccgcctccaggatgatgtcagcgttggggttggcgctggatgagtgcgtgcgcaaacagcgcccccacgcgggcacgcgtagcttgaagcgcgcgcccgcaaactcccgcttgtgggccataagcagggcgtacagctgcctgtgggtccggcaggcgctgtggtcgatgtggtgggcgtccaacaaccccacgattgtctgtttggtgaggtttttaacgcgccccgccccgggaaacgtctgcgtgcttttggccatctgcacgccaaacagttcgccccagattatcttgaacagcgccaccgcgtggtccgtctcgctaacggacccgcgcgggggacagccgcttagggcgtcggcgacgcgcttgacggcttcctccgagagcagaagtccgtcggttacgttacagtggcccagttcgaacaccagctgcatgtagcggtcgtagtggggggtcagtaggtccagcacgtcatcggggccgaaggtcctcccagatcccccggccgccgagtcccaatgcaggcgcgcggccatggtgctgcacaggcacaacagctcccagacgggggttacgttcagggtggggggcagggccacgagctccagctctccggtgacgttgatcgtggggatgacgcccgtggcgtagtggtcatagatccgccgaaatatggcgctgctgcgggtggccatgggaacgcggagacaggcctccagcaacgccaggtaaataaaccgcgtgcgtcccatcaggctgttgaggttgcgcatgagcgcgacaatttccgccggcgcgacatcggaccggaggtatttttcgacgaaaagacccacctcctccgtctcggcggcctgggccggcagcgacgcctcgggatcccggcaccgcagctcccgtagatcgcgctgggccctgagggcgtcgaaatgtacgccccgcaaaaacagacagaagtcctttggggtcagggtatcgtcgtgtccccagaagcgcacgcgtatgcagtttagggtcagcagcatgtgaaggatgttaaggctgtccgagagacacgccagcgtgcatctctcaaagtagtgtttgtaacggaatttgttgtagatgcgcgacccccgccccagcgacgtgtcgcatgccgacgcgtcacagcgccccttgaaccggcgacacagcaggtttgtgacctgggagaactgcgcgggccactggccgcaggaactgaccacgtgattaaggagcatgggcgtaaagacgggctccgagcgcgccccggagccgtccatgtaaatcagtagctcccccttgcggagggtgcgcacccgtcccagggactggtacacggacaccatgtccggtccgtagttcatgggtttcacgtaggcgaacatgccatcaaagtgcaggggatcgaagctgaggcccacggttacgaccgtcgtgtatataaccacgcggtattggccccacgtggtcacgtccccgaggggggtgagcgagtgaagcaacagcacgcggtccgtaaactgacggcagaaccgggccacgatctccgcgaaggagaccgtcgacgaaaaaatgcagatgttatcgcccccgccaaggcgcgcttccagctccccaaagaacgtggccccccgggcctccggagaggcgtccggagacgggccgctcggcggcccgggcgggcgcagggcagcctgcaggagctcggtccccagacgcgggagaaacaggcaccggcgcgccgaaaacccgggcatggcgtactcgccgaccaccacatgcacgtttttttcgccccggagaccgcacaggaagtccaccaactgcgcgttggcggttgcgtccatggcgatgatccgaggacagatgcgcagcaggcgtagcattaacgcatccacgcggcccagttgctgcatcgttggcgaatagagctggcccagcgtcgacataacctcgtccagaacgaggacgtcgtagttgttcagaaggttggggcccacgcgatgaaggctttccacctggacgataagtcggtggaaggggcggtcgttcataatgtaattggtggatgagaagtaggtgacaaagtcgaccaggcctgactcagcgaaccgcgtcgctagggtctgggtaaaactccgacgacaggagacgacgagcacactcgtgtccggagagtggatcgcttcccgcagccagcggatcagcgcggtagtttttcccgaccccattggcgcgcggaccacagtcacgcacctggccgtcggggcgctcgcgttggggaaggtgacgggtccgtgctgctgccgctcgatcgttgttttcgggtgaacccggggcacccattcggccaaatcccccccgtacaacatccgcgctagcgatacgctcgacgtgtactgttcgcactcgtcgtccccaatgggacgcccggcccccagaggatctcccgactccgcgccccccacgaaaggcatgaccggggcgcggacggcgtggtgggtctggtgtgtgcaggtggcgacgtttgtggtctctgcggtctgcgtcacggggctcctcgtcctggcctctgtgttccgggcacggtttccctgcttttacgccacggcgagctcttatgccggggtgaactccacggccgaggtgcgcgggggtgtagccgtgcccctcaggttggacacgcagagccttgtgggcacttatgtaatcacggccgtgttgttgttggccgtggccgtgtatgccgtggtcggcgccgtgacctcccgctacgaccgcgccctggacgcgggccgccgtctggctgcggcccgcatggccatgccgcacgccacgctgatcgccggaaacgtctgctcttggttgctgcagatcaccgtcctgttgctggcccatcgcatcagccagctggcccacctggtttacgtcctgcactttgcgtgtctggtgtattttgcggcccatttttgcaccaggggggtcctgagcgggacgtatctgcgtcaggtgcacggcctgatggagctggccccgacccatcatcgcgtcgtcggcccggctcgcgccgtgctgacaaacgccttgctgttgggcgtcttcctgtgcacggccgacgccgcggtatccctgaataccatcgccgcgttcaactttaatttttcggccccgggcatgctcatctgcctgaccgtgctgttcgccattctcgtcgtatcgctgttgttggtggtcgagggggtgttgtgtcactacgtgcgcgtgttggtgggcccccacctgggggccgtggccgccacgggcatcgtcggcctggcctgcgagcactattacaccaacggctactacgttgtggagacgcagtggccgggggctcagacgggagtccgcgtcgccctcgccctggtcgccgcctttgccctcggcatggccgtgctccgctgcacccgcgcctatctgtatcacaggcggcaccacaccaaattttttatgcgcatgcgcgacacgcgacaccgcgcacattccgccctcaagcgcgtacgcagttccatgcgcggatcgcgagacggccgccacaggcccgcacccggcagcccgcccgggattcccgaatatgcggaagacccctacgcgatctcatacggcggccagctcgaccggtacggagattccgacggggagccgatttacgacgaggtggcggacgaccaaaccgacgtattgtacgccaagatacaacacccgcggcacctgcccgacgacgatcccatctatgacaccgttggggggtacgaccccgagcccgccgaggaccccgtgtacagcaccgtccgccgttggtagctgtttggttccgttttaataaaccgtttgtgtttaacccgaccgtggtgtatgtctggtgtgtggcgtccgatcccgttactatcaccgtccccccccccccctcaaccccggcgattgtgggttttttaaaaacgacacgcgtgcgaccgtatacagaacattgttttggtttttattcgctatcggacatggggggtggaaactgggtggcggggcaggcgcctccgggggtccgccggtgagtgtggcgcgagggggggtccgatgaacgcaggcgctgtctccccggggcccgcgtaaccccgcgcatatccgggggcacgtagaaattaccttcctcttcggactcgatatccacgacgtcaaagtcgtgggcggtcagcgagacgacctccccgtcgtcggtgatgaggacgttgtttcggcagcagcagggccgggccccggagaacgagaggcccatagctcggcgagcgtgtcgtcgaatgccaggcggctgcttcgctggatggccttatagatctccggatcgatgcggacgggggtaatgatcagggcgatcggaacggcctggttcgggagaatggacgccttgctgggtcctgcggccccgagagccccggcgccgtcctccaggcggaacgttacgccctcctccgcgctggtgcggtgcctgccgataaacgtcaccagatgcgggtggggggggcagtcggggaagtggctgtcgagcacgtagccctgcaccaagatctgcttaaagttcgggtgacgggggttcgcgaagacgggctcgcggcggaccagatccccggagctccaggacacgggggagatggtgtggcgtccgaggtcgggggcgccaaacagaagcacctccgagacaacgccgctatttaactccaccaaggcccgatccgcggcggagcaccgccttttttcgcccgaggcgtgggcctctgaccaggcctggtcttgcgtgacgagagcctcctccgggccggggacgcgcccgggcgcgaagtatcgcacgctgggcttcgggatcgaccggataaatgcccggaacgcctccggggaccggtgtgccatcaagtcctcgtacgcggaggccgtggggtcgctggggtccatggggtcgaaagcgtacttggcccggcatttgacctcgtaaaaggccaggggggtcttggggactggggccaggtagccgtgaatgtcccgaggacagacgagaatatccagggacgccccgaccatccccgtgtgaccgtccatgaggaccccacacgtatgcacgttctcttcggcgaggtcgctgggttcgtggaagataaagcgccgcgtgtcggcgccggcctcgccgccgtcgtccgcgcggcccacgcagtagcgaaacagcaggcttcgggccgtcggctcgttcacccgcccgaacatcaccgccgaagactgtacatccggccgcaggctggcgttgtgcttcagccactggggcgagaaacacggaccctgggggccccagcggagggtggatgcggtcgtgaggccccgccggagcagggcccatagctggcagtcggcctggttttgcgtggccgcctcgtaaaaccccatgaggggccggggcgccacggcgtccgcggcggccgggggcccgcggcgcgtcaggcgccataggtgccgaccgagtccgcggtccaccatacccgcctcctcgaggaccacggccagggaacacagataatccaggcgggcccagaggggaccgatggccagaggggcgcggacgccgcgcagcaacccgcgcaggtggcgctcgaacgtctcggctagtatatgggagggcagcgcgttggggatcaccgacgccgaccacatagagtcaaggtccggggagtcgggatcggcgtccgggtcgcgggcgtgggtgcccccaggagatagcggaatgtctggggtcggaggccctgaggcgtcagaaagtgccggcgacgcggcccggggcttttcgtctgcggtgtcggtggcgtgctgatcacgtggggggttaacgggcgaatgggagctcgggtccacagctgatgtcgtctggggtggggggggcaggggacggaaggtggttgtcagcggaagactgttagggcgggggcgcttgggggggctgtcggggccacgaggggtgtcctcggccagggcccagggacgcttagtcacggtgcgtcccggcggacatgctgggcctaccgtggactccatttccgagacgacgtggggggagcggtggttgagcgcgccgccgggtgaacgctgattctcacgacagcgcgtgccgcgcgcacgggttggtgtgacacaggcgggacaccagcaccaggagaggcttaagctcgggaggcagcgccaccgacgacagtatcgccttgtgtgtgtgctggtaatttatacaccgatccgtaaacgcgcgccgaatcttgggattgcggaggtggcgccggatgccctctgggacgtcatacgccaggccgtgggtgttggtctcggccgagttgacaaacagggctgggtgcagcacgcagcgataggcgagcagggccagggcgaagtccggcgacagctggttgttaaaatactggtaaccgggaaaccgggtcacgggtacgcccaggctcggggcgacgtacacgctaaccaccaactccagcagcgtctggcccagggcgtacaggtcaaccgctaacccgacgtcgtgcttcaggcggtggttggtaaattcggcccgttcgttgttaaggtatttcaccaacagctccgggggctggttatacccgtgacccaccagggtgtgaaagttggctgtggttagggcggtgggcatgccaaacatccggggggacttgaggtccggctcctggaggcaaaactgcccccgggcgatcgtggagttggagttgagggtgacgaggctaaagtcggcgaggacggcccgccggagcgagacggcgtccgaccgcagcatgacgaggatgttggcgcacttgatatccaggtggctgatcccgcaggtggtgtttaaaaacacaacggcgcgggccagctccgtgaagcactggtggagggccgtcgagaccgaggggtttgttgtgcgcagggacgccagttggccgatatacttaccgaggtccatgtcgtacgcggggaacactatctgtcgttgttgcagcgagaacccgaggggcgcgatgaagccgcggatgttgtgggtgcggccggcgcgtagaacgcactccccgaccaacagggtcgcgatgagctcaacggcaaaccactccttttcctttatggtcttaacggcaagcttatgttcgcgaatcagttggacgtcaccgtatcccccagaccccccgaagcttcgggccccggggatctcgagggtcgtgtagtgtagggcggggttgatggcgaacacggggctgcatagcttgcggatgcgcgtgagggtgaggatgtgcgagggggacgaggggggtgcggttaacgccgcctgggatctgcgcaggggcgggcggttcagtttggccgccgtaccgggcgtctcgggggacgcgcggcgatgagacgagcggctcattcgccatcgggatagtcccgcgcgaagccgctcgcggaggccggatcggtggcgggacccgtgggaggagcgggagacggcggcgtcctggagagaggggccgctggggcgcccggaggccccgtgggggttggagtgtacgtaggatgcgagccaatccttgaaggaccgttggcgtgcaccttgggggctgaggttagctgccacatgaccagcaggtcgctgtctgcgggactcatccatccttcggccaggtcgccgtctccccacagagaagcgttggtcgctgcttcctcgagttgctcctcctggtccgcaagacgatcgtccacggcgtccaggcgctcaccaagcgccggatcgaggtaccgtcggtgtgcggttagaaagtcacgacgcgccgcttgctcctccacgcgaattttaacacaggtcgcgcgctgtcgcatcatctctaagcgcgcgcgggactttagccgcgcctccaattccaagtgggccgcctttgcagccataaaggcgccaacaaaccgaggatcttgggtgctgacgccctcccggtgcagctgcagggtctggtccttgtaaatctcggctcggaggtgcgtctcggccaggcgtcggcgcagggccgcgtgggcggcatctcggtccattccgccaccctgcgggcgacccggggggtgctctgatagtctcgcgtgcccaaggcccgtgatcggggtacttcgccgccgcgacccgccacccggtgtgcgcgatgtttggtcagcagctggcgtccgacgtccagcagtacctggagcgcctcgagaaacagaggcaacttaaggtgggcgcggacgaggcgtcggcgggcctcaccatgggcggcgatgccctacgagtgccctttttagatttcgcgaccgcgacccccaagcgccaccagaccgtggtccctggcgtcgggacgctccacgactgctgcgagcactcgccgctcttctcggccgtggcgcggcggctgctgtttaatagcctggtgccggcgcaactaaaggggcgtgatttcgggggcgaccacacggccaagctggaattcctggcccccgagttggtacgggcggtggcgcgactgcggtttaaggagtgcgcgccggcggacgtggtgcctcagcgtaacgcctactatagcgttctgaatacgtttcaggccctccaccgctccgaagcctttcgccagctggtgcactttgtgcgggactttgcccagctgctcaaaacctccttccgggcctccagcctcacggagaccacgggcccccccaaaaaacgggccaaggtggacgtggccacccacggccggacgtacggcacgctggagctgttccaaaaaatgatccttatgcacgccacctactttctggccgccgtgctcctcggggaccacgcggagcaggtcaacacgttcctgcgtctcgtgtttgagatccccctgtttagcgacgcggccgtgcgccacttccgccagcgcgccaccgtgtttctcgtcccccggcgccacggcaagacctggtttctggtgcccctcatcgcgctgtcgctggcctcctttcgggggatcaagatcggctacacggcgcacatccgcaaggcgaccgagccggtgtttgaggagatcgacgcctgcctgcggggctggttcggttcggcccgagtggaccacgttaaaggggaaaccatctccttctcgtttccggacgggtcgcgcagtaccatcgtgtttgcctccagccacaacacaaacgtaagtcctcttttctttcgcatggctctcccaaggggccccgggtcgacccgacccacacccacccacccacatacacacacaaccagacgcgggaggaaagtctgccccgtgggcactgatttttattcgggatcgcttgaggaggcccgggcaacggcccgggcaacggtggggcaactcgtagcaaataggcgactgatgtacgaagagaagacacacaggcgccacccggcgctggtcggggggatgttgtccgcgccgcaccgtcccccgacgacctcttgcagacggtccgtgatgcaaggacggcggggggcctgcagcagggtgaccgtatccacgggatggccaaagagaagcggacacaggctagcatccccctggaccgccagggtacactgggccatcttggcccacagacacggggcgacgcagggacaggactccgttacgacggaggagagccacagtgcgttggcggaatcgatgtggggcggcggggcgcaggactcgcagccccccgggtggttggtgatcctggccaggagccatcccagatggcgggccctgcttcccggtggacagagcgaccccaggtcgctgtccatggcccagcagtagatctggccgctggggaggtgccaccaggcccccgggcccaaggcgcagcacgcgcccggctccgggggggtcttcgcggggaccagatacgcgccatccagctcgccgaccactggctcctccgcgagctgttcggtggttgggtcgggggtttcctccgggggggtggccgcccgtatgcgtgcgaacgtgagggtgcacaggagcggggtcagggggtgcgtcacgctccggaggtggacgatcgcgcagtagcggcgctcgcggttaaagaaaaagagggcaaagaaggtgttcgggggcaaccgcagcgccttggggcgcgtcagatacagaaaaatctcgcagaagagggcgcgcccggggtctgggttaggaagggccacctgacacagaggctcggtgaggaccgttagacaccgaaagatcttgagccgctcgtccgcccgaacgacgcgccacacaaagacggagttgacaatgcgcgcgatagagtcgacgtccgtccccaggtcgtcgactctatcgcgcgtgccgcgagctccggcccgggaatccggccggggcaaggtccccgggggaccaggcggcgccaggggccgccggggtcccagctgcgccatgccgggggcggggggagggcaaaccccagaggcgggggccaacggcgcggggaggagtgggtgggcgaggtggccgggggaaggcgcccgctagcgagaccggccgttcccggacgacaccttgcgacaaaacctaaggacagcggcccgcgcgacggggtccgagaggctaaggtaggccgcgatgttaatggtgaacgcaaagccgccgggaaagacaactatgccacagaggcggcgattaaaccccaggcagaggtaggcgtagctttccccgggcaggtattgctcgcagaccctgcgtggggctgtggaggggacggcctccatgaagcgacatttactctgctcgcgtttactgacgtcaccatccatcgccacggcgattggacgattgttaagccgcagcgtgtctccgcttgtgctgtagtagtcaaaaacgtaatggccgtcggagtcggcaaagcgggccgggaggtcgtcgccgagcgggacgacccgccgcccccgaccgccccgtccccccaggtgtgccaggacggccagggcatacgcggtgtgaaaaaaggcgtcgggggcggtcccctcgacggcgcgcatcaggttctcgaggagaatggggaagcgcctggtcacctcccccaaccacgcgcgttggtcggggccaaagtcatagcgcaggcgctgtgagattcgcgggccgccctgaagcgcggcccggatggcctggcccagggcccggaggcacgccagatgtatgcgcgcggtaaaggcgacctcggcggcgatgtcaaagggcggcaggacggggcgcgggtggcgcaggggcacctcgagcgcgggaaagcgtagcagcagctccgcctgcccagcgggagacagctggtgggggcgcacgacgcgttctgcggcgcaggcctcggtcagggccgtggccagcgccgaggacagcagcggagggcgggcgcgtcgcccgccccacgccacggagttctcgtaggagacgacgacgaagcgctgcttggttccgtagtggtggcgcaggaccacggagatagaacgacggctccacagccagtccggccggtcgccgccggccagggcttcccatccgcgatccaaccactcgaccagcgaccgcggctttgcggtaccaggggtaagggttagaacgtcgttcaggatgtcctcgcccccgggcccgtggggcgctggggccacaaagcggcccccgccggggggctccagacccgccagcaccgcatctgcgtcagccgcccccatggcgcccccgctgacggcctggtgaaccagggcgccctggcgtagccccgatgcaacgccacaggccgcacgcccggtccgcgctcggaccgggtggcggcgggtgacgtcctgcactgcccgctgaaccaacgcgaggatctcctcgttctcctgtgcgatggacacgtcctgggccgcggtcgtgtcgccgccgggggccgtcagctgctcctccggggagatgggggggtcggacgccccgacgatgggcgggtctgcgggcgcccccgcgtggggccgggccaagggctgcggacgcggggacgcgctttcccccagacccatggacaggtgggccgcagcctccttcgcggccggcggggcggcggcgccaagcagagcgacgtagcggcacaaatgccgacagacgcgcatgatgcgcgtgctgtcggccgcgtagcgcgtgttgggggggacgagctcgtcgtaactaaacagaatcacgcgggcacagctcgcccccgagccccacgcaaggcgcagcgccgccacggcgtacgggtcatagacgccctgcgcgtcacacaccacgggcagggagacgaacaaccccccggcgctggacgcacgcggaaggaggccagggtgtgccggcacgacgggggccagaagctcccccaccgcatccgcgggcacgtaggcggcaaacgccgtgcaccacggggtacagtcgccggtggcatgagcccgagtctggatttcgacctggaagtttgcggccgtcccgagtccggggcggccgcgcatcagggcggccagagggattcccgcggccgccaggcactcgctggatatgatgacgtgaaccaaagaccgagggccgacccgggccgtggccgagatcgtctggacctcgttggccaagtgcgcgttcatggttcgggggtgggtgtgggtgtgtaggcgatgcgggtcccccgagtccgcgggaagggcgtgggtttggcgcgcgtatgcgtattcgccaacggaggcgtgcgtgcttatgcgcggcgcgtttcttctgtctctagggaatccgaggccaggactttaacctgctctttgtcgacgaggccaactttattcgcccggatgcggtccagacgattatgggctttctcaaccaggccaactgcaagattatcttcgtgtcgtccaccaacaccgggaaggccagtacgagctttttgtacaacctccgcggggccgcagacgagcttctcaacgtggtgacctatatatgcgatgatcacatgccgagggtggtgacgcacacaaacgccacggcctgttcttgttatatcctcaacaagcccgttttcatcacgatggacggggcggttcgccggaccgccgatttgtttctggccgattccttcatgcaggagatcatcgggggccaggccagggagaccggcgacgaccggcccgttctgaccaagtctgcgggggagcggtttctgttgtaccgcccctcgaccaccaccaacagcggcctcatggcccccgatttgtacgtgtacgtggatcccgcgttcacggccaacacccgagcctccgggaccggcgtcgctgtcgtcgggcggtaccgcgacgattatatcatcttcgccctggagcacttttttctccgcgcgctcacgggctcggcccccgccgacatcgcccgctgcgtcgtccacagtctgacgcaggtcctggccctgcatcccggggcgtttcgcggcgtccgggtggcggtcgagggaaatagcagccaggactcggccgtcgccatcgccacgcacgtgcacacagagatgcaccgcctactggcctcggagggggccgacgcgggctcgggccccgagcttctcttctaccactgcgagcctcccgggagcgcggtgctgtacccctttttcctgctcaacaaacagaagacgcccgcctttgaacactttattaaaaagtttaactccgggggcgtcatggcctcccaggagatcgtttccgcgacggtgcgcctgcagaccgacccggtcgagtatctgctcgagcagctaaataacctcaccgaaaccgtctcccccaacactgacgtccgtacgtattccggaaaacggaacggcgcctcggatgaccttatggtcgccgtcattatggccatctacctcgcggcccaggccggacctccgcacacattcgctcctatcacacgcgtctcgtgagcgcccaataaacacacccaggtatgctacgcacgaccacggtgtcgtctgttaaggggggggggggaagggggtgttggcgggaagcgtgggaacacgggggattctctcacgaccggcaccagtaccacccccctgtgaacacagaaaccccaacccaaatcccataaacatacgacacacaggcatattttggaatttcttaggtttttatttatttaggtatgctggggtttctccctggatgcccacccccacccccccgtgggtctagccgggccttagggatagcgtataacgggggccatgtctccggaccgcacaacggccgcgccgtcaaaggtgcacacccgaaccacgggagccagggccaaggtgtctcctagttggcccgcgtgggtcagccaggcgacgagcgcctcgtaaagcggcagccttcgctctccatcctgcatcagggccggggcttcggggtgaatgagctgggcggcctcccgcgtgacactctgcatctgcagtagagcgttcacgtacccgtcctgggcacttagcgcaaagagccgggggattagcgtaaggatgatggtggttccctccgtgatcgagtaaaccatgttaaggaccagcgatcgcagctcggcgtttacgggaccgagttgttggacgtccgccagcagcgagaggcgactcccgttgtagtacagcacgttgaggtctggcagccctccggggtttctggggctggggttcaggtcccggatgcccctggccacgagccgcgccacgatttcgcgcgccaggggcgatggaagcggaacgggaaaccgcaacgtgaggtccagcgaatccaggcgcacgtccgtcgcttggccctcgaacacgggcgggacgaggctgatggggtccccgttacagagatctacgggggaggtgttgcgaaggttaacggtgccggcgtgggtgaggcccacgtccagggggcaggcgacgattcgcgtgggaagcacccgggtgatgaccgcggggaagcgccttcggtacgccagcaacaaccccaacgtgtcgggactgacgcctccggagacgaaggattcgtgcgccacgtcggccagcgtcagttgccggcggatggtcggcaggaataccacccgcccttcgcagcgctgcagcgccgccgcatcggggcgcgagatgcccgagggtatcgcgatgtcagtttcaaagccgtccgccagcatggcgccgatccacgcggcagggagtgcagtggtggttcgggtggcgggaggagcgcggtgggggtcagcggcgtagcagagacgggcgaccaacctcgcataggacggggggtgggtcttagggggttgggaggcgacagggaccccagagcatgcgcggggaggtctgtcgggcccagacgcaccgagagcgaatccgtccgcggagtcccggcttgggttttatggggcccggccctcggaatcgcggcttgtcggcggggacaaagggggcggggctaggggcttgcggaaacagaagacgcgtgggataaaagaatcgcactaccccaaggaagggcggggcggtttattacagagccagtcccttgagcggggatgcgtcatagacgagatactgcgcgaagtgggtctcccgcgcgtgggcttccccgttgcgggcactgcggaggagggcggggtcgctggcgcaggtgagcgggtaggcctcctgaaacaggccacacgggtcctccacgagttcgcggcaccccggggggcgcttaaactgtacgtcgctggcggcggtggccgtggacaccgccgaacccgtctccacgatcaggcgctccaggcagcgatgtttggcggcgatgtcggccgacgtaaagaacttaaagcaggggctgagcaccggcgaggccccgttgaggtggtaggccccgttatagagcaggtccccgtacgaaaatcgctgcgacgcccacgggttggccgtggccgcgaaggcccgggacgggtcgctctggccgtggtcgtacatgagggcggtgacatccccctccttgtcccccgcgtaaacgcccccggcggcgcgtccccgggggttgcagggccggcggaagtagttgacgtcggtcgacacgggggtggcgataaactcacacacggcgtcctggccgtggtccatccctgcgcgccgcggcacctgggcgcacccgaacacggggacgggctgggccggccccaggcggtttcccgccacgaccgcgttccgcaggtacacggctgccgcgttgtccaggagagggggagccccgcggcccaggtaaaagttttggggaaggttgcccatgtcggtgacggggttgcggacggttgccgtggccacgacggcggtgtagcccacgcccaggtccacgttcgcgcgcggctgggtgagcgtgaagtttacccccccgccagtttcgtgccgggccacctggagctggcccaggaagtacgcctccgacgcgcgctccgagaacagcacgttctcagtcacaaagcggtcctgtcggacgacggtgaacccaaacccgggatggaggcccgtcttgagctgatgatgcaaggccacgggactgatcttgaagtaccccgccatgagcgcgtaggtcagcgcgttctccccggccgcgctctcgcggacgtgctgcacgacgggctgtcggatcgacgaaaagtagttggcccccagagccggggggaccagggggacctgccgcgacaggtcgcgcagggccggggggaaattgggcgcgttcgccacgtggtcggccccggcgaacagcgcgtggacggggagggggtaaaaatagtcgccattttggatggtatggtccagatgctggggggccatcagcaggattccggcgtgcaacgccccgtcgaatatgcgcatgttggtggtggacgcggtgttggcgcccgcgtcgggcgccgccgagcagagcagcgccgttgtgcgttcggccatgttgtgggccagcacctgcagcgtgagcatggcgggcccgtccactaccacgcgcccgttgtgaaacatggcgttgaccgtgttggccaccagattggccgggtgcagggggtgcgcggggtccgtcacggggtcgctggggcactcctcgccgggggcgatctccgggaccaccatgttctgcagggtggcgtatacgcggtcgaagcgaacccccgcggtgcagcagcggccccgcgagaaggcgggcaccatcacgtagtagtaaatcttgtggtgcacggtccagtccgccccccggtgcggccggtcatccgcggcgtccgcggctcgggcctgggtgttgtgcagcagctggccgtcgttgcggttgaagtccgcggtcgccacgttacatgccgccgcgtacacggggtcgtggccccccgcgctaacccggcagtcgcgatggcggtccagggccgcgcgccgcatcagggcgtcacagtcccacacgaggggtggcagcagcgccgggtctcgcattaggtgattcagctcggcttgcgcctgcccgcccagctccgggccggtcagggtaaagtcatcaaccagctgggccagggcctcgacgtgcgccaccaggtcccggtacacggccatgcactcctcgggaaggtctcccccgaggtaggtcacgacgtacgagaccagcgagtagtcgttcacgaacgccgcgcaccgcgtgttgttccagtagctggtgatgcactggaccacgagccgggccagggcgcagaagacgtgctcgctgccgtgtatggcggcctgcagcaggtaaaacaccgccgggtagttgcggtcgtcgaacgccccgcgaacggcggcgatggtggcgggggccatggcgtggcgtcccacccccagctccaggccccgggcgtcccggaacgccgccggacatagcgccaggggcaagttgccgttcaccacgcgccaggtggcctggatctcccccgggccggccgggggaacgtccccccccggcagctccacgtcggccacccccacaaagaagtcgaacgcggggtgcagctcaagagccaggttggcgttgtcgggctgcataaactgctccggggtcatctggccttccgcgacccatcggacccgcccgtgggccaggcgctgcccccaggcgttcaaaaacagctgctgcatgtctgcggcggggccggccggggccgccacgtacgccccgtacggattggcggcttcgacggggtcgcggttaaggcccccgaccgccgcgtcaacgttcatcagcgaagggtggcacacggtcccgatcgcgtgttccagagacaggcgcagcacctggcggtccttcccccaaaaaaacagctggcggggcgggaaggcgcggggatccgggtggccgggggcggggactaggtccccggcgtgcgcggcaaaccgttccatgaccggattgaacaggcccaggggcaggacgaacgtcaggtccatggcgcccaccagggggtagggaacgttggtggcggcgtagatgcgcttctccagggcctccagaaagaccagcttctcgccgatggacaccagatccgcgcgcacgcgcgtcgtctggggggcgctctcgagctcgtccagcgtctgccggttcaggtcgagctgctcctcctgcatctccagcaggtggcggcccacgtcgtccagacttcgcacggccttgcccatcacgagcgccgtgaccaggttggccccgttcaggaccatctcgccgtacgtcaccggcacgtcggcttcggtgtcctccactttcaggaaggactgcaggaggcgctgtttgatcggggcggtggtgacgagcaccccgtcgaccggccgcccgcgcgtgtcggcatgcgtcagacggggcacggccacggagggctgcgtggccgtggtgaggtccacgagccaggcctcgacggcctcccggcggtggcccgccttgcccaggaaaaagctcgtctcgcagaagcttcgctttagctcggcgaccagggtcgcccgggccaccctggtggccaggcggccgttgtccaggtatcgttgcatcggcaacaacaaagccaggggcggcgccttttccagcagcacgtgcagcatctggtcggccgtgccgcgctcaaacgccccgaggacggcctggacgttgcgagcgagctgttggatggcgcgcaactggcgatgcgcgccgatacccgtcccgtccagggcctcccccgtgagcagggcgatggcctcggtggccaggctgaaggcggcgttcagggcccggcggtcgataatcttggtcatgtaattgtgtgtgggttgctcgatggggtgcgggccgtcgcgggcaatcagcggctggtggacctcgaactgtacgcgcccctcgttcatgtaggccagctccggaaacttggtacacacgcacgccaccgacaacccgagctccagaaagcgcacgagcgacagggtgttgcaatacgaccccagcagggcgtcgaactcgacgtcgtacaggctgtttgcatcggagcgcacgcgggaaaaaaaatcaaacaggcgtcgatgcgacgccacctcgatcgtgctaaggagggacccggtcggcaccatggccgcggcataccggtatcccggagggtcgcggttgggagcggccatggggtcgcgtggagatcggctgtctctagcgatattggcccggggaggctaagatccaccccaacgcccggccacccgtgtacgtgcccgacggcccaaggtccaccgaaagacacgacgggcccggacccaaaaaggcgggggatgctgtgtgagaggccgggtgccggtcgggggggaaaggcaccgggagaaggctgcggcctcgttccaggagaacccagtgtccccaacagacccggggacgtgggatcccaggccttatatacccccccccccgccccacccccgttagaacgcgacgggtgcattcaagatggccctggtccaaaagcgtgccaggaagaaattggcagaggcggcaaagctgtccgccgccgccacccacatcgaggccccggccgcgcaggctatccccagggcccgtgtgcgcaggggatcggtgggcggcagcatttggttggtggcgataaagtggaaaagcccgtccggactgaaggtctcgtgggcggcggcgaacaaggcacacagggccgtgcctcccaaaaacacggacatcccccaaaacacgggcgccgacaacggcagacgatccctcttgatgttaacgtacaggaggagcgcccgcaccgcccacgtaacgtagtagccgacgatggcggccaggatacaggccggcgccaccacccttccggtcagcccgtaatacatgcccgctgccaccatctccaacggcttcaggaccaaaaacgaccaaaggaacagaatcacgcgctttgaaaagaccggctgggtatggggcggaagacgcgagtatgccgaactgacaaaaaaatcagaggtgccgtacgaggacaatgaaaactgttcctccagcggcagttctccctcctcccccccgaaggcggcctcgtcgaccagatctcgatccaccagaggaaggtcatcccgcatggtcatggggtgtgcggtggaggtggggagaccgaaaccgcaaagggtcgcttacgtcagcaggatcccgagatcaaagacacccgggttcttgcacaaacaccacccgggttgcatccgcggaggcgagtgttttgataaggccgttccgcgccttgatataacctttgatgttgaccacaaaacccggaatttacgcctacgccccaatgcccacgcaagatgaggtaggtaacccccccgtgggtgtgacgttgcgtttagttcattggaggccaaggggaaaaatggggtggggaggaaacggaaaacccagtaggccgtgtcgggaacacgcccggggttgtcctcaaaaggcagggtccatactacggaagccgtcgttgtattcgagacctgcctgtgcaacgcacgtcggggttgcctgtgtccggttcggcccccaccgcgtgcggcacgcacgaggacgagtccgcgtgctttattggcgttccaagcgttgccctccagtttctgttgtcggtgttcccccatacccacgcccacatccaccgtagggggcctctgggccgtgttacgtcgccgcccgcgatggagcttagctacgccaccaccatgcactaccgggacgttgtgttttacgtcacaacggaccgaaaccgggcctactttgtgtgcggggggtgtgtttattccgtggggcggccgtgtgcctcgcagcccggggagattgccaagtttggtctggtcgttcgagggacaggcccagacgaccgcgtggtcgccaactatgtacgaagcgagctccgacaacgcggcctgcaggacgtgcgtcccattggggaggacgaggtgtttctggacagcgtgtgtcttctaaacccgaacgtgagctccgagctggatgtgattaacacgaacgacgtggaagtgctggacgaatgtctggccgagtactgcacctcgctgcgaaccagcccgggtgtgctaatatccgggctgcgcgtgcgggcgcaggacagaatcatcgagttgtttgaacacccaacgatagtcaacgtttcctcgcactttgtgtataccccgtccccatacgtgttcgccctggcccaggcgcacctcccccggctcccgagctcgctggaggccctggtgagcggcctgtttgacggcatccccgccccacgccagccacttgacgcccacaacccgcgcacggatgtggttatcacgggccgccgcgccccacgacccatcgccgggtcgggggcggggtcggggggcgcgggcgccaagcgggccaccgtcagcgagttcgtgcaagtcaaacacattgaccgcgtgggccccgctggcgtttcgccggcgcctccgccaaacaacaccgactcgagttccctggtgcccggggcccaggattccgccccgcccggccccacgctaagggagctgtggtgggtgttttatgccgcagaccgggcgctggaggagccccgcgccgactctggcctcacccgcgaggaggtacgtgccgtacgtgggttccgggagcaggcgtggaaactgtttggctccgcgggggccccgcgggcgtttatcggggccgcgttgggcctgagccccctccaaaagctagccgtttactactatatcatccaccgagagaggcgcctgtcccccttccccgcgctagtccggctcgtaggccggtacacacagcgccacggcctgtacgtccctcggcccgacgacccagtcttggccgatgccatcaacgggctgtttcgcgacgcgctggcggccggaaccacagccgagcagctcctcatgttcgaccttctccccccaaaggacgtgccggtgggaagcgacgtgcaggccgacagcaccgctctgctgcgctttatagaatcgcaacgtctcgccgtccccgggggggtgatctcccccgagcacgtcgcgtaccttggtgcgttcctgagcgtgctgtacgctggccgcgggcgcatgtccgcagccacgcacaccgcgcggctgacaggggtgacctccctggtgctagcggtgggtgacgtggaccgtctttccgcgtttgaccgcggagcggcgggcgcggccagccgcacgcgggccgccgggtacctggatgtgcttcttaccgttcgtctcgctcgctcccaacacggacagtctgtgtaaaagaccccaataaacgtatatcgctactacacccttgtgtgtcaatggacgcctctccgggggggggggagggaaagcaaagaggggctgggggagcggcaccaccggggcctgaacaaacaaaccacagacacggttacagtttattcggtcgggcggagaaacggccgaagccacgcccactttattcgcgtctccaaaaaaacgggacacttgtccggagaacctttaggatgccagccagggcggcggtaatcataaccacgcccagcgcagaggcggccagaaacccgggcgcaattgcggccacgggctgcgtgtcaaaggctagcaaatgaatgacggttccgtttggaaatagcaacaaggccgtggacggcacgtcgctcgaaaacacgcttggggcgccctccgtcggcccggcggcgatttgctgctgtgtgttgtccgtatccaccagcaacacagacatgacctccccggccggggtgtagcgcataaacacggcccccacgagccccaggtcgcgctggttttgggtgcgcaccagccgcttggactcgatatcccgggtggagccttcgcatgtcgcggtgaggtaggttaggaacagtgggcgtcggacgtcgacgccggtgagcttgtagccgatcccccggggcagaggggagtgggtgacgacgtagctggcgttgtgggtgatgggtaccaggatccgtggctcgacgttggcagactgccccccgcaccgatgtgaggcctcagggacgaaggcgcggatcagggcgttgtagtgtgcccaacgcgtcagggtcgaggcgaggccgtgggtctgctgggccaggacttcgaccggggtctcggatcgggtggcttgagccagcgcgtccaggataaacacgctctcgtctagatcaaagcgcagggaggccgcgcatggcgaaaagtggtccggaagccaaaagagggttttctggtggtcggcccgggccagcgcggtccggaggtcggcgttggtcgctgcggcgacgtcggacgtacacagggccgaggctatcagaaggctccggcgggcgcgttcccgctgcaccgccgaggggacgccagccaagaacggctgccggaggacagccgaggcgtaaaatagcgcccggtggacgaccggggtggtcagcacgcggccccctagaaactcggcatacagggcgtcgatgagatgggctgcgctgggcgccactgcgtcgtacgccgaggggctatccagcacgaaggccagctgatagcccagcgcgtgtaatgccaagctctgttcgcgctccagaatctcggccaccaggtgctggagccgagcctctagctgcaggcgggccgtgggatccaagactgacacattaaaaaacacagaatccgcggcacagcccgcggccccgcgggcggccaacccggcaagcgcgcgcgagtgggccaaaaagcctagcaggtcggagaggcagaccgcgccgtttgcgtgggcggcgttcacgaaagcaaaacccgacgtcgcgagcagccccgttaggcgccagaagagaggggggcgcgggccctgctcggcgcccgcgtcccccgagaaaaactccgcgtatgcccgcgacaggaactgggcgtagttcgtgccctcctccgggtagccgcccacgcggcggagggcgtccagcgcggagccgttgtcggcccgcgtcagggaccctaggacaaagacccgataccgggggccgcccgggggcccgggaagagcccccggggggttttcgtccgcggggtccccgacccgatctagcgtctggcccgcggggaccaccatcacttccaccggagggctgtcgtgcatggatatcacgagccccatgaattcccgcccgtagcgcgcgcgcaccagcgcggcatcgcacccgagcaccagctcccccgtcgtccagatgcccacgggccacgtcgaggccgacggggagaaatacacgtacctacctggggatctcaacaggccccgggtggccaaccaggtcgtggacgcgttgtgcaggtgcgtgatgtccagctccgtcgtcgggtgccgccgggccccaaccggcggtcgggggggcggtgtatcacgcggcccgctcgggtggctcgccgtcgccacgttgtctccccgcgggaacgtcagggcctcggggtcagggacggccgaaaacgttacccaggcccgggaacgcagcaacacggaggcggctggattgtgcaagagacccttaaggggggcgaccgaggggggaggctgggcggtcggctcgaccgtggtgggggcgggcaggctcgcgttcgggggccggccgagcaggtaggtcttcgggatgtaaagcagctggccggggtcccgcggaaactcggccgtggtgaccaatacaaaacaaaagcgctcctcgtaccagcgaagaaggggcagagatgccgtagtcaggtttagttcgtccggcggcgccagaaatccgcgcggtggtttttgggggtcgggggtgtttggcagccacagacgcccggtgttcgtgtcgcgccagtacatgcggtccatgcccaggccatccaaaaaccatgggtctgtctgctcagtccagtcgtggacctgaccccacgcaacgcccaaaataataacccccacgaaccataaaccattccccatgggggaccccgtccctaacccacggggcccgtggctatggcagggcttgccgccccgacgttggctgcgagccctgggccttcacccgaacttgggggttggggtggggaaaaggaagaaacgcgggcgtattggtcccaatggggtctcggtggggtatcgacagagtgccagccctgggaccgaaccccgcgtttatgaacaaacgacccaacacccgtgcgttttattctgtctttttattgccgtcatagcgcgggttccttccggtattgtctccttccgtgtttcagttagcctcccccatctcccgggcaaacgtgcgcgccaggtcgcagatcgtcggtatggagcctggggtggtgacgtgggtctggaccatcccggaggtaagttgcagcagggcgtcccggcagccggcgggcgattggtcgtaatccaggataaagacatgcatgggacggaggcgtttggccaagacgtccaaagcccaggcaaacacgttatacaggtcgccgttgggggccagcaactcgggggcccgaaacagggtaaataacgtgtccccgatatggggtcgtgggcccgcgttgctctggggctcggcaccctggggcggcacggccgcccccgaaagctgtccccaatcctcccgccacgacccgccgccctgcagataccgcaccgtattggcaagcagcccataaacgcggcgaatcgcggccagcatagccaggtcaagccgctcgccggggcgctggcgtttggccaggcggtcgatgtgtctgtcctccggaagggcccccaacacgatgtttgtgccgggcaaggtcggcgggatgagggccacgaacgccagcacggcctggggggtcatgctgcccataaggtatcgcgcggccgggtagcacaggagggcggcgatgggatggcggtcgaagatgagggtgagggccgggggcggggcatgtgagctcccagcctcccccccgatatgaggagccagaacggcgtcggtcacggcataaggcatgcccattgttatctgggcgcttgtcattaccaccgccgcgtccccggccgatatctcaccctggtcgaggcggtgttgtgtggtgtagatgttcgcgattgtctcggaagcccccaacacccgccagtaagtcatcggctcgggtacgtagacgatatcgtcgcgcgaacccagggccaccagcagttgcgtggtggtggttttccccatcccgtggggaccgtctatataaacccgcagtagcgtgggcattttctgctccaggcggacttccgtggctttttgttgccggcgagggcgcaacgccgtacgtcggttgttatggccgcgagaacgcgcagcctggtcgaacgcagacgcgtgttgatggcaggggtacgaagccatacgcgcttctacaaggcgctggccgaagaggtgcgggagtttcacgccaccaagatctgcggcacgctgttgacgctgttaagcgggtcgctgcagggtcgctcggtattcgaggccacacgcgtcaccttaatatgcgaagtggacctgggaccgcgccgccccgactgcatctgcgtgttcgaattcgccaatgacaagacgctgggcggggtttgtgtcatcatagaactaaagacatgcaaatatatttcttccggggacaccgccagcaaacgcgagcaacgggccacggggatgaagcagctgcgccactccctgaagctcctgcagtccctcgcgcctccgggtgacaagatagtgtacctgtgccccgtcctggtgtttgtcgcccaacggacgctccgcgtcagccgcgtgacccggctcgtcccgcagaaggtctccggtaatatcaccgcagtcgtgcggatgctccagagcctgtccacgtatacggtccccattgagcctaggacccagcgagcccgtcgccgccgcggcggcgccgcccgggggtctgcgagcagaccgaaaaggtcacactctggggcgcgcgacccgcccgagtcagcggcccgccagttaccacccgccgaccaaacccccacctccacggagggcgggggggtgcttaagaggatcgcggcgctcttctgcgtgcccgtggccaccaagaccaaaccccgagccgcctccgaatgagagtgtttcgttccttccccctccccccgcgtcagacaaaccctaaccaccgcttaagcggcccccgcgaggtccgaagactcatttggatccggcgggagccacccgacaacagcccccgggttttcccacgccagacgccggtccgctgtgccatcgcgccccctcatcccaccccccatcttgtccccaaataaaacaaggtctggtagttaggacaacgaccgcagttctcgtgtgttattttcgctctccgcctctcgcagatggacccgtactgcccatttgacgctctggacgtctgggaacacaggcgcttcatagtcgccgattcccgaaacttcatcacccccgagttcccccgggacttttggatgtcgcccgtctttaacctcccccgggagacggcggcggagcaggtggtcgtcctacaggcccagcgcacagcggctgccgctgccctggagaacgccgccatgcaggcggccgagctccccgtcgatatcgagcgccggttacgcccgatcgaacggaacgtgcacgagatcgcaggcgccctggaggcgctggagacggcggcggccgccgccgaagaggcggatgccgcgcgcggggatgagccggcgggtgggggcgacgggggggcgcccccgggtctggccgtcgcggagatggaggtccagatcgtgcgcaacgacccgccgctacgatacgacaccaacctccccgtggatctgctacacatggtgtacgcgggccgcggggcgaccggctcgtcgggggtggtgttcgggacctggtaccgcactatccaggaccgcaccatcacggactttcccctgaccacccgcagtgccgactttcgggacggccgtatgtccaagaccttcatgacggcgctggtactgtccctgcaggcgtgcggccggctgtatgtgggccagcgccactattccgccttcgagtgcgccgtgttgtgtctctacctgctgtaccgaaacacgcacggggccgccgacgatagcgaccgcgctccggtcacgttcggggatctgctgggccggctgccccgctacctggcgtgcctggccgcggtgatcgggaccgagggcggccggccacagtaccgctaccgcgacgacaagctccccaagacgcagttcgcggccggcgggggccgctacgaacacggagcgctggcgtcgcacatcgtgatcgccacgctgatgcaccacggggtgctcccggcggccccgggggacgtcccccgggacgcgagtacccacgttaaccccgacggcgtggcgcaccacgacgacataaaccgcgccgccgccgcgttcctcagccggggccacaacctattcctgtgggaggaccagactctgctgcgggcaaccgcgaacaccataacggccctgggcgttatccagcggctcctcgcgaacggcaacgtgtacgcggaccgcctcaacaaccgcctgcagctgggcatgctgatccccggagccgtcccttcggaggccatcgcccgtggggcctccgggtccgactcgggggccatcaagagcggagacaacaatctggaggcgctatgtgccaattacgtgcttccgctgtaccgggccgacccggcggtcgagctgacccagctgtttcccggcctggccgccctgtgtcttgacgcccaggcggggcggccggtcgggtcgacgcggcgggtggtggatatgtcatcgggggcccgccaggcggcgctggtgcgcctcaccgccctggaactcatcaaccgcacccgcacaaaccccacccctgtgggggaggttatccacgcccacgacgccctggcgatccaatacgaacaggggcttggcctgctggcgcagcaggcacgcattggcttgggctccaacaccaagcgtttctccgcgttcaacgttagcagcgactacgacatgttgtactttttatgtctggggttcattccacagtacctgtcggcggtttagtgggtggtgggcgaggggggagggggcattagggagaaaaaacaagagcctccgttgggttttctttgtgcctgtactcaaaaggtcataccccgtaaacggcgggctccagtcccggcccggcggttggcgtgaacgcaacggcgggagctgggttagcgtttagtttagcattcgctctcgcctttccgcccgccccccgaccgttgcgcctttttttttttcgtccaccaaagtctctgtgggtgcgcgcatggcagccgatgccccgggagaccggatggaggagcccctgcccgacagggccgtgcccatttacgtggctgggtttttggccctgtatgacagcggggactcgggcgagttggcattggatccggatacggtgcgggcggccctgcctccggataacccactcccgattaacgtggaccaccgcgctggctgcgaggtggggcgggtgctggccgtggtcgacgacccccgcgggccgttttttgtggggctgatcgcctgcgtgcagctggagcgcgtcctcgagacggccgccagcgctgcgattttcgagcgccgcgggccgccgctctcccgggaggagcgcctgttgtacctgatcaccaactacctgccctcggtctccctggccacaaaacgcctggggggcgaggcgcaccccgatcgcacgctgttcgcgcacgtcgcgctgtgcgcgatcgggcggcgcctcggcactatcgtcacctacgacaccggtctcgacgccgccatcgcgccctttcgccacctgtcgccggcgtctcgcgagggggcgcggcgactggccgccgaggccgagctcgcgctgtccgggcgcacctgggcgcccggcgtggaggcgctgacccacacgctgctttccaccgccgttaacaacatgatgctgcgggaccgctggagcctggtggccgagcggcggcggcaggccgggatcgccggacacacctacctccaggcgagcgaaaaattcaaaatgtggggggcggagcctgtttccgcgccggcgcgcgggtataagaacggggccccggagtccacggacataccgcccggctcgatcgctgccgcgccgcagggtgaccggtgcccaatcgtccgtcagcgcggggtcgccttgtccccggtactgccccccatgaaccccgttccgacatcgggcaccccggcccccgcgccgcccggcgacgggagctacctgtggatcccggcctcccattacaaccagctcgtcgccggccatgccgcgccccaaccccagccgcattccgcgtttggtttcccggctgcggcggggtccgtggcctatgggcctcacggtgcgggtctttcccagcattaccctccccacgtcgcccatcagtatcccggggtgctgttctcgggacccagcccactcgaggcgcagatagccgcgttggtgggggccatagccgcggaccgccaggcgggcggtcagccggccgcgggagaccctggggtccgggggtcgggaaagcgtcgccggtacgaggcggggccgtcggagtcctactgcgaccaggacgaaccggacgcggactacccgtactaccccggggaggctcgaggcgcgccgcgcggggtcgactcccggcgcgcggcccgccattctcccgggaccaacgagaccatcacggcgctgatgggggcggtgacgtctctgcagcaggaactggcgcacatgcgggctcggaccagcgccccctatggaatgtacacgccggtggcgcactatcgccctcaggtgggggagccggaaccaacaacgacccacccggccctttgtcccccggaggccgtgtatcgccccccaccacacagcgccccctacggtcctccccagggtccggcgtcccatgcccccactcccccgtatgccccagctgcctgcccgccaggcccgccaccgcccccatgtccttccacccagacgcgcgcccctctaccgacggagcccgcgttcccccccgccgccaccggatcccaaccggaggcatccaacgcggaggccggggcccttgtcaacgccagcagcgcagcacacgtggacgttgacacggcccgcgccgccgatttgttcgtctctcagatgatgggggcccgctgattcgccccggtctttggtaccatgggatgtcttactgtatatctttttaaataaaccaggtaataccaaataagacccattggtgtatgttctttttttattgggaggcgcgggtaggcgggtagctttacaatgcaaaagccttcgacgtggaggaaggcgtggggggggggggaatcggcactgaccaagggggtccgttttgtcacgggaaaggaaagaggaaacaggccgcggacacccgggggagtttgtgttcccttttctttcttcccacacacacaaaaggcgtaccaaacaaacaaaccaaaagatgcacatgcggtttaacacccgtggtttttatttacaacaaaccccccatcacaggtcgtcctcgtcggcgtcaccgtctttgttgggaacttgggtgtagttggtgttgcggcgcttgcgcatgaccatgtcggtgaccttggcgctgagcagcgcgctcgtgcccttcttcttggccttgtgttccgtgcgctccatggcagacaccagggccatgtaccgtatcatctcccgggcctcggctagcttggcctcgtcaaagtcgccgccctcctcgccctccccggacgcgtccgggttggtggggttcttgagctccttggtggttagcgggtacagggccttcatggggttgctctgcagccgcatgacgtagcgaaaggcgaagaaggccgccgccaggccggccaggaccaacagacccacggccagcgccccaaaggggttggacatgaaggaggacacgcccgacacggccgataccacgccgcccacgatgcccatcaccaccttgccgaccgcgcgccccaggtcgcccatcccctcgaagaacgcgcccaggcccgcaaacatggcggcgttggcgtcggcgtggatgaccgtgtcgatgtcggcgaagcgcaggtcgtgcagctggttgcggcgctggacctccgtgtagtccagcaggccgctgtccttgatctcgtggcgggtgtacacctccagggggacaaactcgtgatcctccagcatggtgatgttgaggtcgatgaaggtgctgacggtggtgatgtcggcgcggctcagctggtgggagtacgcgtactcctcgaagtacacgtagcccccaccgaaggtgaagtagcgccggtgtcccacggtgcacggctcgatcgcatcgcgcgtcagccgcagctcgttgttctcccccagctgcccctcgaccaacgggccctggtcttcgtaccgaaagctgaccagggggcggctgtagcaggccccgggccgcgagctgatgcgcatcgagttttggacgatcacgttgtccgcggcgaccggcacgcacgtggagacggccatcacgtcgccgagcatccgcgcgctcacccgccggcccacggtggccgaggcgatggcgttggggttcagcttgcgggcctcgttccacagggtcagctcgtgattctgcagctcgcaccacgcgatggcaacgcggcccaacatatcgttgacatggcgctgtatgtggttgtacgtaaactgcagcctggcgaactcgatggaggaggtggtcttgatgcgctccacggacgcgttggcgctggccccgggcggcgggggcgtggggtttgggggcttgcggctctgctcgcggaggtgttcccgcacgtacagctccgcgagcgtgttgctgagaaggggctggtacgcgatcagaaagcccccattggccaggtagtactgcggctggcccaccttgatgtgcgtcgcgttgtacctgcgggcgaagatgcggtccatggcgtcgcgggcgtccttgccgatgcagtcccccaggtccacgcgcgagagcgggtactcggtcaggttggtggtgaaggtggtggatatggcgtcggaagagaatcggaaggagccgccgtactcggagcgcagcatctcgtccacctcctgccacttggtcatggtgcagaccgacgggcgctttggcacccagtcccaggccacggtgaacttgggggtcgtgagcaggttccgggtggtcggcgccgtggcccgggccttggtggtgaggtcgcgcgcgtagaagccgtcgacctgcttgaagcggtcggcggcgtagctggtgtgttcggtgtgcgacccctcccggtagccgtaaaacggggacatgtacacaaagtcgccagtcgccaacacaaactcgtcgtacgggtacaccgagcgcgcgtccacctcctcgacgatgcagtttaccgtcgtcccgtaccggtggaacgcctccacccgcgaggggttgtacttgaggtcggtggtgtgccagccccggctcgtgcgggtcgcggcgttggccggtttcagctccatgtcggtctcgtggtcgtcccggtgaaacgcggtggtctccaggttgttgcgcacgtacttggccgtggaccgacagacccccttggcgttgatcttgtcgatcacctcctcgaaggggacgggggcgcggtcctcaaagatccccataaactgggagtagcggtggccgaaccacacctgcgaaacggtgacgtctttgtagtacatggtggccttgaacttgtacggggcgatgttctccttgaagaccaccgcgatgccctccgtgtagttctgaccctcgggccgggtcgggcagcggcgcggctgctcgaactgcaccaccgtggcgcccgtggggggtgggcacacgtaaaagtttgcatcggtgttctccgccttgatgtcccgcaggtgctcgcgcagggtggcgtggcccgcggcgacggtcgcgttgtcgccggcggggcgcggcggctttgggggtttcggttttctgttcttcttcggtttcgggtcccccgttgggggggcgccaggggcgggcggcgccggagtggcagggcccccgttcgccgcctgggtcgcggccgcgaccccaggcgtgccgggggaactcggagccgccgacgccaccaggacccccagcgtcaaccccaagagcgcccatacgacgaaccaccggcgcccccgcgcgggggcgccctggcgcatggcgggactacgggggcccgtcgtgccccccgtcaggtagcctgggggcgaggtgctggaggaccgagtagaggatcgagaaaacgtctcggtcgtagaccacgaccgaccgggggccgatacagccgtcgggggcgctctcgacgatggccaccagcggacagtcggagtcgtacgtgagatatacgccgggcgggtaacggtaacgaccttcggaggtcgggcggctgcagtccgggcggcgcaactcgagctccccgcaccggtagaccgaggcaaagagtgtggtggcgataatcagctcgcgaatatatcgccaggcggcgcgctgagtgggcgttattccggaaatgccgtcaaaacagtaaaacctctgaaattcgctgacggcccaatcagcacccgagccccccgcccccatgatgaaccgggcgagctcctccttcaggtgcggcaggagccccacgttctcgacgctgtaatacagcgcggtgttggggggctgggcgaagctgtgggtggagtgatcaaagaggggcccgttgacgagctcgaagaagcgatgggtgatgctggggagcagggccgggtccacctggtgtcgcaggagagacgctcgcatgaaccggtgcgcgtcgaacacgcccggcgccgagcggttgtcgatgaccgtgcccgcgcccgccgtcagggcgcagaagcgcgcgcgcgccgcaaagccgttggcgaccgcggcgaacgtcgcgggcagcacctcgccgtggacgctgacccgcagcatcttctcgagctccccgcgctgctcgcggacgcagcgccccaggctggccaacgaccgcttcgtcaggcggtccgcgtacagccgccgtcgctcccgcacgtccgcggccgcttgcgtggcgatgtccccccacgtctcgggcccctgccccccgggcccgcggcgacggtcttcgtcctcgcccccgcccccgggagctcccaacccccgtgccccttcctctacggcgacacggtccccgtcgtcgtcggggcccgcgccgcccttgggcgcgtccgccgcgccccccgcccccatgcgcgccagcacgcgacgcagcgcctcctcgtcgcactgttcggggctgacgaggcgccgcaagagcggcgtcgtcaggtggtggtcgtagcacgcgcggatgagcgcctcgatctgatcgtcgggtgacgtggcctgaccgccgattattagggcgtccaccatatccagcgccgccaggtggctcccgaacgcgcgatcgaaatgctccgcccgccgcccgaacagcgccagttccacggccaccgcggcggtctcctgctgcaactcgcgccgcgccagcgcggtcaggttgctggcaaacgcgtccatggtggtctggccggcgcggtcgccggacgcgagccagaatcgcaattcgctgatggcgtacaggccgggcgtggtggcctgaaacacgtcgtgcgcctccagcagggcgtcggcctccttgcggaccgagtcgttctcgggcgacgggtggggctgcccgtcgccccccgcggtccgggccagcgcatggtccaacacggagagcgcccgcgcgcggtcggcgtccgacagcccggcggcgtggggcaggtaccgccgcagctcgttggcgtccagccgcacctgcgcctgctgggtgacgtggttacagatacggtccgccaggcggcgggcgatcgtcgccccctggttcgccgtcacacacagttcctcgaaacagaccgcgcaggggtgggacgggtcgctaagctccggggggacgataaggcccgaccccaccgcccccaccataaactcccgaacgcgctccagcgcggcggtggcgccgcgcgagggggtgatgaggtggcagtagtttagctgctttagaaagttctcgacgtcgtgcaggaaacacagctccatatggacggtcccgccatacgtatccagcctgacccgttggtgatacggacagggtcgggccaggcccatggtctccgtgaaaaacgccgcgacgtctcccgcggtcgcgaacgtctccaggctgcccaggagccgctcgccctcgcgccacgcgtactctagcagcaactccagggtgaccgacagcggggtgagaaaggccccggcctgggcctccaggcccggcctcagacgacgccgcagcgcccgcacctgaagcgcgttcagcttcagttgggggagcttcccccgtccgatgtgggggtcgcaccgccggagcagctctatctgaaacacataggtctgcacctgcccgagcagggctaacaacttttgacgggccacggtgggctcggacaccggggcggccatctcgcggcgccgatctgtaccgcggccggagtatgcggtggaccgaggcggtccgtacgctacccggcgtctggctgagccccggggtccccctcttcggggcggcctcccgcgggcccgccgaccggcaagccgggagtcggcggcgcgtgcgtttctgctctattcccagacaccgcggagaggaatcacggcccgcccagagatatagacacggaacacaaacaagcacggatgtcgtagcaataatttattttacacacattccccgccccgccctaggttcccccaccccccaacccctcacagcatatccaacgtcaggtctccctttttgtcggggggcccctccccaaacgggtcatccccgtggaacgcccgtttgcggccggcaaatgccggtcccggggcccccgggccgccgaacggcgtcgcgttgtcgtcctcgcagccaaaatccccaaagttaaacacctccccggcgttgccgagttggctgactagggcctcggcctcgtgcgccacctccagggccgcgtccgtcgaccactcgccgttgccgcgctccagggcacgcgcggtcagctccatcatctcctcgcttaggtactcgtcctccaggagcgccagccagtcctcgatctgcagctgctgggtgcggggccccaggcttttcacggtcgccacgaacacgctactggcgacggccgccccgccctcggagataatgccccggagctgctcgcacagcgagctttcgtgcgctccgccgccgaggcttgaggccgcgcacacaaacccggcccggggacaggccaggacgaacttgcgggtgcggtcaaaaataaggagcgggcacgcgtttttgccgcccatcaggctggcccagttcccggcctgaaacacacggtcgttgccggccatgccgtagtacttgctgatgctcaaccccaacacgaccatggggcgcgccgccatgacgggccgcagcaggttgcagctggcgaacatggacgtccacgcgcccggatgcgcgtccacggcgtccatcagcgcgcgggccccggcctccaggcccgccccgccctgcgcggaccacgcggccgcagcctgcacgctggggggacggcgggaccccgcgatgatggccgtaagggtgttgatgaagtatgtcgagtgatcgcagtaccgcagaatctggtttgccatgtagtacatcgccagctcgctcacgttgttgggggccaggttaataaagtttatcgcgccgtagtccagggaaaactttttaatgaacgcgatggtctcgatgtcctcgcgcgacaggagccgggcgggaagctggttgcgttggagggccgtccagaaccactgcgggttcggctggttggaccccgggggcttgccgttggggaagatggccgcgtggaactgcttcagcagaaagcccagcggtccgaggaggatgtccacgcgcttgtcgggcttctggtaggcgctctggaggctggcgacccgcgccttggcggcctcggacgcgttggcgctcgcgcccgcgaacaacacgcggctcttgacgcgcagctccttgggaaaccccagggtcacgcgggcaacgtcgccctcgaagctgctctcggcgggggccgtctggccggccgttaggctgggggcgcagatagccgccccctccgagagcgcgaccgtcagcgttttggccgacagaaacccgttgttaaacatgtccatcacgcgccgccgcagcaccggttggaattgattgcgaaagttgcgcccctcgaccgactgcccggcgaacaccccgtggcactgactcagggccaggtcctggtacacggcgaggttggatcgccgcccgagaagctgaagcagggggcacggcccgcacgcgtacgggtccagcgtcagggacatggcgtggttggcctcgcccagaccgtcgcgaaacttgaagttcctcccctccaccaggttgcgcatcagctgctccacctcgcggtccacgacctgcctgacgttgttcaccaccgtatgcagggcctcgcggttggtgatgatggtctccagccgccccatggccgtggggaccgcctggtccacgtactgcagggtctcgagttcggccatgacgcgctcggtcgccgcgcggtacgtctcctgcatgatggtccgggcggtctcggatccgtccgcgcgcttcagggccgagaaggcggcgtagtttcccagcacgtcgcagtcgctgtacatgctgttcatggtcccgaagacgccgatggctccgcgggcggcgctggcgaactttggatggcgcgcccggaggcgcatgagcgtcgtgtgtacgcaggcgtggcgcgtgtcgaaggtgcataggttacagggcacgtcggtctggttggagtccgcgacgtatcgaaacacgtccatctcctggcgcccgacgatcacggcgccgtcgcagcgctccaggtaaaacagcatcttggccagcagcgccggggaaaacccacacagcatggccaggtgctcgccggcaaattcctgggttccgccgacgaggggcgcggtgggccgaccctcgaacccgggcaccacgtgtccctcgcggtccacctgtgggttggccgccacgtgggtcccgggcacgaggaagaagcggtaaaaggagggtttgctgtggtcctttgggtccgccgggccggcgtcgtccacctcggtgagatggagggccgagttggtgctaaataccatggcccccacgagtcccgcggcgcgcgccaggtacgccccgacggcgttggcgcgggccgcggccgtgtcctggccctcgaacagcggccacgcggagatgtcggtgggcggctcgtcaaagacggccatcgacacgatagactcgagggccagggcggcgtctccggccatgacggaggccaggcgctgttcgaacccgcccgccgcgcccttgccgccgccgtcgcgcccgccccgcggggtcttaccctggctggcttcgaaggccgtgaacgtaatgtcggcggggagggcggcgccctcgtggttttcgtcaaacgccaggtgggcggccgcgcgggccacggcgtccacgtttcggcatcgcagtgccacggcggcgggtcccacgaccgcctcgaacaggaggcggttgagggggcggttaaaaaacggaagcgggtaggtaaatttctccccgatcgatcggtggttggcgttgaacggctctgcgatgacacggctaaaatccggcatgaacagctgcaacgggtacacgggtatgcggtgcacctccgccccgcctatggttaccttgtccgagcctcccaggtgcagaaaggtgttgttgatgcacacggcctccttgaagccctcggtaacgaccagatacaggagggcgcggtccgggtccaggccgaggcgctcacacagcgcctcccccgtcgtctcgtgtttgaggtcgccgggccggggggtgtagtccgaaaagccaaaatggcggcgtgcccgctcgcaaagtcgcgtcaggttcggggcctgggtgctggggtccaggtgccggccgccgtgaaagacgtacacggacgagctgtagtgcgagggcgtcagtttcagggacaccgcggtacccccgagccccgtcgtgcgagaacccacgaccacggccacgttggcctcaaagccgctctccacggtcaggcccacgaccaggggcgccacggcgacgtcggaatcgccgctgcgtgccgacagtaacgccagaagctcgatgccttcggacggacacgcgcgagcgtacacgtatcccaggggcccgggggggaccttgatggtggttgccgtcttgggctttgtctccatgtccttttgtcaatcggtccgcgaacggaggtaatcccggcacgacgacggacgcccgacaaggtatgtctcccgagcgtcaaaatccgggggggggcggcgacggtcaaggggagggttggagaccggggttggggaatgaatccctccccttcaccgacaaccccccgggtaaccacggggtcgccgatgaaccccggcggccggcaacgcggggtccctgcgagaggcacagatgcttacggtcaggtgctccgggtcgggtgcgtctggtatgcggttggtatatgtacactttacctgggggcgtgccggtccgccccagcccctcccacgccccgcgcgtcatcagccggtgggcgtggccgctattataaaaaaagtgagaacgcgaagcgttcgcactttgtcctaataatatatatattattaggacaaagtgcgaacgcttcgcgttctcactttttttataatagcggccacgcccaccggctacgtcactctcctgtcggccgccggcggtccataagcccggccggccgggccgacgcgaataaaccgggccgccggccggggcgccgcgcagcagctcgccgcccggatccgccagacaaacaaggcccttgcacatgccggcccgggcgagcctgggggtccggtaattttgccatcccacccaagcggctttttgggtttttctcttcccccctccccacattcccctctttaggggttcgggtgggaacaaccgcgatgttttccggtggcggcggcccgctgtcccccggaggaaagtcggcggccagggcggcgtccgggttttttgcgcccgccggccctcgcggagccagccggggacccccgccttgtttgaggcaaaacttttacaacccctacctcgccccagtcgggacgcaacagaagccgaccgggccaacccagcgccatacgtactatagcgaatgcgatgaatttcgattcatcgccccgcgggtgctggacgaggatgcccccccggagaagcgcgccggggtgcacgacggtcacctcaagcgcgcccccaaggtgtactgcgggggggacgagcgcgacgtcctccgcgtcgggtcgggcggcttctggccgcggcgctcgcgcctgtggggcggcgtggaccacgccccggcggggttcaaccccaccgtcaccgtctttcacgtgtacgacatcctggagaacgtggagcacgcgtacggcatgcgcgcggcccagttccacgcgcggtttatggacgccatcacaccgacggggaccgtcatcacgctcctgggcctgactccggaaggccaccgggtggccgttcacgtttacggcacgcggcagtacttttacatgaacaaggaggaggtcgacaggcacctacaatgccgcgccccacgagatctctgcgagcgcatggccgcggccctgcgcgagtccccgggcgcgtcgttccgcggcatctccgcggaccacttcgaggcggaggtggtggagcgcaccgacgtgtactactacgagacgcgccccgctctgttttaccgcgtctacgtccgaagcgggcgtgtgctgtcgtacctgtgcgacaacttctgcccggccatcaagaagtacgagggtggggtcgacgccaccacccggttcatcctggacaaccccgggttcgtcaccttcggctggtaccgtctcaaaccgggccggaacaacacgctagcccagccggcggccccgatggccttcgggacatccagcgacgtcgagtttaactgtacggcggacaacctggccatcgaggggggcatgagcgacctaccggcatacaagctcatgtgcttcgatatcgaatgcaaggcggggggggaggacgagctggcctttccggtggccgggcacccggaggacctggtcatccagatatcctgtctgctctacgacctgtccaccaccgccctggagcacgtcctcctgttttcgctcggttcctgcgacctccccgaatcccacctgaacgagctggcggccaggggcctgcccacgcccgtggttctggaattcgacagcgaattcgagatgctgttggccttcatgacccttgtgaaacagtacggccccgagttcgtgaccgggtacaacatcatcaacttcgactggcccttcttgctggccaagctgacggacatttacaaggtccccctggacgggtacggccgcatgaacggccggggcgtgtttcgcgtgtgggacataggccagagccacttccagaagcgcagcaagataaaggtgaacggcatggtgaacatcgacatgtacgggattataaccgacaagatcaagctctcgagctacaagctcaacgccgtggccgaagccgtcctgaaggacaagaagaaggacctgagctatcgcgacatccccgcctactacgccgccgggcccgcgcaacgcggggtgatcggcgagtactgcatacaggattccctgctggtgggccagctgttttttaagtttttgccccatctggagctctcggccgtcgcgcgcttggcgggtattaacatcacccgcaccatctacgacggccagcagatccgcgtctttacgtgcctgctgcgcctggccgaccagaagggctttattctgccggacacccaggggcgatttaggggcgccgggggggaggcgcccaagcgtccggccgcagcccgggaggacgaggagcggccagaggaggagggggaggacgaggacgaacgcgaggagggcgggggcgagcgggagccggagggcgcgcgggagaccgccggcaggcacgtggggtaccagggggccagggtccttgaccccacttccgggtttcacgtgaaccccgtggtggtgttcgactttgccagcctgtaccccagcatcatccaggcccacaacctgtgcttcagcacgctctccctgagggccgacgcagtggcgcacctggaggcgggcaaggactacctggagatcgaggtgggggggcgacggctgttcttcgtcaaggctcacgtgcgagagagcctcctcagcatcctcctgcgggactggctcgccatgcgaaagcagatccgctcgcggattccccagagcagccccgaggaggccgtgctcctggacaagcagcaggccgccatcaaggtcgtgtgtaactcggtgtacgggttcacgggagtgcagcacggactcctgccgtgcctgcacgttgccgcgacggtgacgaccatcggccgcgagatgctgctcgcgacccgcgagtacgtccacgcgcgctgggcggccttcgaacagctcctggccgatttcccggaggcggccgacatgcgcgcccccgggccctattccatgcgcatcatctacggggacacggactccatctttgtgctgtgccgcggcctcacggccgccgggctgacggccgtgggcgacaagatggcgagccacatctcgcgcgcgctgtttctgccccccatcaaactcgagtgcgaaaagacgttcaccaagctgctgctgatcgccaagaaaaagtacatcggcgtcatctacgggggtaagatgctcatcaagggcgtggatctggtgcgcaaaaacaactgcgcgtttatcaaccgcacctccagggccctggtcgacctgctgttttacgacgataccgtctccggagcggccgccgcgttagccgagcgccccgcggaggagtggctggcgcgacccctgcccgagggactgcaggcgttcggggccgtcctcgtagacgcccatcggcgcatcaccgacccggagagggacatccaggactttgtcctcaccgccgaactgagcagacacccgcgcgcgtacaccaacaagcgcctggcccacctgacggtgtattacaagctcatggcccgccgcgcgcaggtcccgtccatcaaggaccggatcccgtacgtgatcgtggcccagacccgcgaggtagaggagacggtcgcgcggctggccgccctccgcgagctagacgccgccgccccaggggacgagcccgccccccccgcggccctgccctccccggccaagcgcccccgggagacgccgtcgcctgccgaccccccgggaggcgcgtccaagccccgcaagctgctggtgtccgagctggccgaggatcccgcatacgccattgcccacggcgtcgccctgaacacggactattacttctcccacctgttgggggcggcgtgcgtgacattcaaggccctgtttgggaataacgccaagatcaccgagagtctgttaaaaaggtttattcccgaagtgtggcaccccccggacgacgtggccgcgcggctccggaccgcagggttcggggcggtgggtgccggcgctacggcggaggaaactcgtcgaatgttgcatagagcctttgatactctagcatgagccccccgtcgaagctgatgtccctcattttacaataaatgtctgcggccgacacggtcggaatctccgcgtccgtgggtttctctgcgttgcgccggaccacgagcacaaacgtgctctgccacacgtgggcgacgaaccggtaccccgggcacgcggtgagcatccggtctatgagccggtagtgcaggtgggcggacgtgccgggaaagatgacgtacagcatgtggcccccgtaagtggggtccgggtaaaacaacagccgcgggtcgcacgccccgcctccgcgcaggatcgtgtggacgaaaaaaagctcgggttggccaagaatcccggccaagaggtcctggaggggggcgttgtggcggtcggccaacacgaccaaggaggccaggaaggcgcgatgctcgaatatcgtgttgatctgctgcacgaaggccaggattagggcctcgcggctggtggcggcgaaccgcccgtctcccgcgttgcacgcgggacagcaacccccgatgcctaggtagtagcccatcccggagagggtcaggcagttgtcggccacggtctggtccagacagaagggcagcgagacgggagtggtcttcaccaggggcaccgagagcgagcgcacgatggcgatctcctcggagggcgtctgggcgagggcggcgaaaaggccccgatagcgctggcgctcgtgtaaacacagctcctgtttgcgggcgtgaggcggcaggctcttccgggaggcccgacgcaccacgcccagagtcccgccggccgcagaggagcgcgaccgccggcgctccttgccgtgatagggcccgggccgggagccgcggcgatgggggtcggtgtcatacataggtacacagggtgtgctccagggacaggagcgagatcgagtggcgtctaagcagcgcgcccgcctcacggacaaatgtggcgagcgcggtgggctttggtacaaatacctgatacgtcttgaaggtgtagatgagggcacgcaacgctatgcagacacgcccctcgaactcgttcccgcaggccagcttggccttgtggagcagcagctcgtcgggatgggtggcggggggatggccgaacagaacccaggggtcaacctccatctccgtaatggcgcacatggggtcacagaacatgtgcttaaagatggcctcgggccccgcggcccgaagcaggctcacaaaccggcccccgtccccgggctgcgtctcggggtcagcctcgagctggtcgacgacgggtacgatacagtcgaagaggctcgtgttgttttccgagtagcggaccacggaggcccggagtctgcgcagggccagccagtaagcacgcaccagtaacaggttacacagcaggcattctccgccggtgcgcccgcgcccccggccgtgtttcagcacggtggccatcagagggcccaggtcgaggtcgggctgggcatcgggttcggtaaactgcgcaaagcgcggagccacgtcgcgcgtgcgtgccccgcgatgcgcttcccaggactggcggaccgtggcgcgacgggcctccgcggcagcgcgcagctggggccccgactcccagacggcgggggtgccggcgaggagcaacaggaccagatccgcgtacgcccacgtatccggcgactcctccggctcgcggtccccggcgaccgtctcgaattccccgttgcgagcggcggcgcgagtacagcagctgtccccgcccccgcgccgaccctccgtgcagtccaggagacgggcgcaatccttccagttcatcagcgcggtggtgagcgacggctgcgtgccggatcccgccgccgaccccgccccctcctcgcccccggaggccaaggttccgatgagggcccgggtggcagactgcgccaggaacgagtagttggagtactgcaccttggcggctcccggggagggcgagggcttgggttgcttctgggcatgccgcccgggcaccccgccgtcggtacggaagcagcagtggagaaaaaagtgccggtggatgtcgtttatggtgagggcaaagcgtgcgaaggagccgaccagggtcgccttcttggtgcgcagaaagtggcggtccatgacgtacacaaactcgaacgcggccacgaagatgctagcggcgcagtggggcgcccccaggcatttggcacagagaaacgcgtaatcggccacccactgaggcgagaggcggtaggtttgcttgtacagctcgatggtgcggcagaccagacagggccggtccagcgcgaaggtgtcgatggccgccgcggaaaagggcccggtgtccaaaagcccctccccacagggatccgggggcgggttgcggggtcctccgcgcccgcccgaaccccctccgtcgcccgcccccccgcgggcccttgagggggcggtgaccacgtcggcggcgacgtcctcgtcgagcgtaccgacgggcggcacacctatcacgtgactggccgtcaggagctcggcgcagagagcctcgttaagagccaggaggctgggatcgaaggccacatacgcgcgctcgaacgcccccgccttccagctgctgccgggggactcttcgcacaccgcgacgctcgccaggaccccggggggcgaagttgccatggctgggcgggaggggcgcacgcgccagcgaactttacgggacacaatccccgactgcgcgctgcggtcccagaccctggagagtctagacgcgcgctacgtctcgcgagacggcgcgcatgacgcggccgtctggttcgaggatatgacccccgccgagctggaggttgtcttcccgactacggacgccaagctgaactacctgtcgcggacgcagcggctggcctccctcctgacgtacgccgggcctataaaagcgcccgacgacgccgccgccccgcagaccccggacaccgcgtgtgtgcacggcgagctgctcgccgccaagcgggaaagattcgcggcggtcattaaccggttcctggacctgcaccagattctgcggggctgacgcgcgtgctgttgggcgggacggttcgcgaaccctttggtgggtttacgcgggcacgcacgctcccatcgcgggcgccatggcgggactgggcaagccctacaccggccacccaggtgacgccttcgagggtctcgttcagcgaattcggcttatcgtcccatctacgttgcggggcggggacggggaggcgggcccctactctccctccagcctcccctccaggtgcgcctttcagtttcatggccatgacgggtccgacgagtcgtttcccatcgagtatgtactgcggcttatgaacgactgggccgaggtcccgtgcaacccttacctgcgcatacagaacaccggcgtgtcggtgctgtttcaggggttttttcatcgcccacacaacgcccccgggggcgcgattacgccagagcggaccaatgtgatcctgggctccaccgagacgacggggctgtccctcggcgacctggacaccatcaaggggcggctcggcctggatgcccggccgatgatggccagcatgtggatcagctgctttgtgcgcatgccccgcgtgcagctcgcgtttcggttcatgggccccgaagatgccggacggacgagacggatcctgtgccgcgccgccgagcaggctattacccgtcgccgccgaacccggcggtcccgggaggcgtacggggccgaggccgggctgggggtggccggaacgggtttccgggccaggggggacggttttggcccgctccccttgttaacccaagggccctcccgcccgtggcaccaggccctgcggggtcttaagcacctacggattggcccccccgcgctcgttttggcggcgggactcgtcctgggggccgctatttggtgggtggttggtgctggcgcgcgcctataaaaaaggacgcaccgccgccctaatcgccagtgcgttccggacgccttcgccccacacagccctcccgaccgacacccccatatcgcttcccgacctccggtcccgatggccgtcccgcaatttcaccgccccagcaccgttaccaccgatagcgtccgggcgcttggcatgcgcgggctcgtcttggccaccaataactctcagtttatcatggataacaaccacccgcacccccagggcacccaaggggccgtgcgggagtttctccgcggtcaggcggcggcgctgacggaccttggtctggcccacgcaaacaacacgtttaccccgcagcctatgttcgcgggcgacgccccggccgcctggttgcggcccgcgtttggcctgcggcgcacctattcaccgtttgtcgttcgagaaccttcgacgcccgggaccccgtgaggcccggggagttccttctggggtgttttaatcaataaaagaccacaccaacgcacgagccttgcgtttaatgtcgtgtttattcaagggagtgggatagggttcgacggttcgaaacttaacacaccaaataatcgagcgcgtctagcccagtaacatgcgcacgtgatgtaggctggtcagcacggcgtcgctgtgatgaagcagcgcccggcgggtccgctgtaactgctgttgtaggcggtaacaggcgcggatcagtaccgccagggcgctacgaccggtgcgttgcacgtagcgtcgcgacagaactgcgtttgccgatacgggcggggggccgaattgtaagcgcgtcacctcttgggagtcatcggcggataacgcactgaatggttcgttggttatgggggagtgtggttccccagggagtgggtcgagcgcctcggcctcggaatccgagaggaacaacgaggtggcgtcggagtcttcgtcgtcagagacatacagggtctgaagcagcgacacgggcgggggggtagcgtcgatgtgtagcgcgagggaggatgcccacgaagacaccccagacaaggagctgcccgtgcgtggatttgtggaagacgcggaagccgggacggatgggcggttttgcggtgcccggaaccgaaccgccggatactccccgggtgctacatgcccgttttggggctggggttggggctggggttggggctggggttggggctggggttggggctggggttggggctggggttggggttggggttggggctggggttggggttggggctggggctggggctggggctggggctggggctggggctggggctggggctggggctggggctggggctggggctggggctggggctggggctggggttggggcgcggacaggcggctgacggtcaaatgcccccgggggcgcgcagatgtggtgggcgtggccaccggctgccgtgtagtggggcggcgggaaaccgggcctccgggcgcaacaccgccctccagcgtcaagtatgtggggggcgggcctgacgtcgggggcggggcgacgggttggaccgcgggaggcgggggagagggacctgcgggagaggatgaggtcggctcggccgggttgcggcctaaaacaggggccgtggggtcggcggggtcccagggtgaagggagggattcccgcgattcggacagcgacgcgacagcggggcgcgtaaggcgccgctgcggcccgcctacgggaaccctggggggggttggcgcgggacccgaggttagcggggggcggcggttttcgcccccgggcaaaaccgtgccggttgcgaccgggggcggaacgggatcgatagggagagcgggagaagcctggccggcggcctggggcccgagcgggaggggcacaccagacaccaaagcgtggggcgctggctctgggggtttgggaggggccggggggcgcgcgaaatcggtaaccggggcgaccgtgtcggggagggcaggcggccgccaaccctgggtggtcgcggaagcctgggtggcgcgcgccagggagcgtgcccggcggtgtcggcgcgcgcgcgacccggacgaagaagcggcagaagcgcgggaggaggcgggggggcggggggcggtggcatcggggggcgccggggaactttggggggacggcaagcgccggaagtcgtcgcgggggcccacgggcgccggccgcgtgctttcggccgggacgcccggtcgtgcttcgcgagccgtgactgccggcccagggggccgcggtgcacactgggacgtggggacggactgatcggcggtgggcgaaagggggtccggggcaaggaggggcgcggggccgccggagtcgtcagacgcgagctcctccaggccgtgaatccatgcccacatgcgaggggggacgggctcgccgggggtggcgtcggtgaatagcgtgggggccaggcttccgggccccaacgagccctccgccccaacaaggtccacagggccgggggtcgggtttgggaccgaggggctctggtcgtcgggggcgcgctggtacaccggatgccccgggaatagctcccccgacaggagggaggcgtcgaacggccgcccgaggatagctcgcgcgaggaaggggtcctcgtcggtggcgctggcggcgaggacgtcctcgccgcccgccacaaacgggagctcctcggtggcctcgctgccaacaaaccgcacgtcgggggggccgggggggtccgggttttcccacaacaccgcgaccggggtcatggagatgtccacgagcaccagacacggcgggccccgggcgaggggccgctcggcgatgagcgcggacaggcgcgggagctgtgccgccagacacgcgttttcgatcgggttcaggtcggcgtgcaggaggcggacggcccacgtctcgatgtcggacgacacggcatcgcgcaaggcggcgtccggcccgcgagcgcgtgagtcaaacagcgtgagacacagctccagctccgactcgcgggaaaaggccgtggtgttgcggagcgccacgacgacgggcgcgcccaggagcactgccgccagcaccaggtccatggccgtaacgcgcgccgcgggggtgcggtgggtggcggcggccggcacggcgacgtgctggcccgtgggccggtagagggcgttggggggagcggggggtgacgcctcgcgcccccccgaggggctcagcgtctgcccagattccagacgcgcggtcagaagggcgtcgaaactgtcatactctgtgtagtcgtccggaaacatgcaggtccaaagagcgaccagagcggtgcttgggagacacatgcgcccgaggacgctcaccgccgccagcgcctgggcgggactcagctttcccagcgcggcgccgcgctcggttcccagctcggggaccgagcgccagggcgccagggggtcggtttcggacaacttgccgcggcgccagtctgccagccgcgtgccgaacatgaggccccgggtcggagggcctccggccgaaaacgctggcagcacgcggatgcgggcgtctggatgcggggtcaggcgctgcacgaatagcatggaatctgctgcgttctgaaacgcacgggggagggtgagatgcatgtactcgtgttggcgaaccagatccaggcgccaaaaggtgtaaatgtgttccggggagctggccaccagcgccaccagcacgtcgttctcgttaaaggaaacgcggtgcctagtggagctctggggtccgagcggcggccccggggccgccgcgtcacccccccattccagctgggcccagcgacacccaaactcgcgcgtgagagtggtcgcgacgagggcgacgtagagctcggccgccgcatccatcgaggccccccatctcgcctggcggtggcgcacaaagcgtccgaagagctgaaagttggcggcctgggcgtcgctgagggccagctgaagccggttgatgacggtgaggacgtacatggccgtgacggtcgaggccgactccagggtgtccgtcggaagcggggggcgaatgcatgccgcctcgggacacatcagcagcgcgccgagcttgtcggtcacggccgggaagcagagcgcgtactgcagtggcgttccatccgggaccaaaaagctgggggcgaacggccgatccagcgtactggtggcctcgcgcagcaccaggggccccgggcctccgctcactcgcaggtacgcctcgccccggcggcgcagcatctgcgggtcggcctcttggccgggtggggcggacgcccgggcgcgggcgtctagggcgcgaagatccacgagcaggggcgcgggcgcggccgccgcgcccgcgcccgtctggcctgtggccttggcgtacgcgctatataagcccatgcggcgttggatgagctcccgcgcgccccggaactcctccaccgcccatggggccaggtccccggccaccgcgtcgaattccgccaacaggccccccagggtgtcaaagttcatctcccaggccacccttggcaccacctcgtcccgcagccgggcgctcaggtcggcgtgttgggccacgcgccccccgagctcctccacggccccggcccgctcggcgctcttggcgcccaggacgccctggtacttggcgggaaggcgctcgtagtcccgctgggctcgcagccccgacacagtgttggtggtgtcctgcagggcgcgaagctgctcgcatgccgcgcgaaatccctcgggcgatttccaggcccccccgcgaacgcggccgaagcgaccccatacctcgtcccactccgcctcggcctcctcgagagacctccgcagggcctcgacgcggcgacgggtgtcgaagagcgcctgcaggcgcgcgccctgtcgcgtcaggaggcccgggccgtcgccgctggccgcgcttagcgggtgcgtctcaaaggtacgctgggcatgttccaaccaggcgaccgcctgcacgtcgagctcgcgcgccttctccgtctggtccaccagaatttcgacctgatccgcgatctcctccgccgagcgcgcctggtccagcgtcttggccacggtcgccgggacggcgaccaccttcagcagggtcttcagattggccagaccctcggcctcgagctgggcccggcgctcgcgcgcggccagcacctcccgcagccccgccgtgacccgctcggtggcttcggcgcgctgctgtttggcgcgcaccacggcgtccttggtatcggccaggtcctgtcgggtcacgaatgcgacgtagtgcgcgtacgccgtgtccttcacggggctctggtccacgcgctccagcgccgccacgcacgccaccagcgcgtcctcgctcgggcagggcagggtgacccctgcccggacaagctcggcggccgccgccgggtcgttgcgcaccgcggatatctcctccgcggcggcggccaggtccagcgccacgcttccgatcgcgcgccgcgcgtcggcccggagggcgtccaggcgatcgcggatatccacgtactcggcgtagcccttttgaaaaaacggcacgtactggcgcagggccggcacgccccccaagtcttccgacaggtgtaggacggcctcgtggtagtcgataaacccgtcgttcgcctgggcccgctccagcagcccccccgccagccgcagaagccgcgccaggggctcggtgtccacccgaaacatgtcggcgtacgtgtcggccgcggccccgaaggccgcgctccagtcgatgcggtgaatggctgcgagcggggggagcatggggtggcgctggttctcgggggtgtatgggttaaacgcaagggccgtctccagggcaagggtcaccgccttggcgttggttcccagcgcctgttcggcccgctttcggaagtcccgggggttgtagccgtgcgtgcccgccagcgcctgcaggcgacggagctcgaccacgtcaaactcggcaccgctttccacgcggtccagcacggcctccacgtcggcggcccagcgctcgtggctactgcgggcgcgctgggccgccatcttctctctgaggtcggcggtggcggcctcaagttcgtcggcgcggcgtcgcgtggcgccgatgacctttcccagctcctgcagggcgcgcccgctgggggagtggtccccggccgtcccttcggcgtgcaacaggcccccgaacctgccctcgtggcccgcgaggctttcccgcgcgccggtggtcgcgcgcgtcgcggcctggatcagggaggcatgctctccctccggttggttggcggcccggcgcacctggacgacaaggtcggcggcagccgaccctaaggtcgtgagctgggcgatggccacccgcgcgtccagggccaaccgagtcgccttgacgtatcccgcggcgctgtcggccatggccgctaggaaggccaggggggaggccgggtcgctggcggccgcgcccagggccgtcaccgcgtcgaccaggacgcggtgcgcccgcacggccgcatccaccgtcgacgcagggtctgccgttgcgacggcggcgctgccggcgttgatggcgttcgagacggcgtgggctatgatcggggcgtgatcggcgaagaactgcaagagaaacggagtctctggggcgtcggcgaacaggttcttcagcaccaccacgaagctgggatgcaagccagacagagccgtcgccgtgtccggagtcgggtgctccagggcatctcggtactgccccagcagcccccacatgtccgcccgcagcgccgccgtaacctcagggggcgccccccgaacggcctcggggaggtccgaccagcccgccggcagggaggcccgcagggtcgccaggacggccggacaggcctttagccccacaaagtcagggagggggcgcaggaccccctggagtttgtgcaagaacttctcccgggcgtcgcgggccaccttcgcccgctcccgcgctccctcgagcattgcctccagggagcgcgcgcgctcccgcaaacgggcacgcgcatcgggggcgagctctgccgtcagcttggcggcatccatggcccgcgcctgccgcagcgcttcctcggccatgcgcgtggcctctggcgacagcccgccgtcgtcggggtagggcgacgcgccgggcgcaggaacaaaggccgcgtcgctgtccagctgctggcccagggccgcatctagggcgtcgaagcgccgcagctcggccagacccgagctgcggcgcgcctgttggtcgttaatgtcgcggatgctgcgcgccagctcgtccagtggcttgcgttctatcagcccttggttggcggcgtccgtcaggacggagagccaggccgccaggtcctcgggggcgtccagcgtctggccccgctggatcagatcccgcaacaggatggccgtggggctggtcgcgatcgggggcggggcgggaatggcggcgcgctgcgcgatgtcccgcgtgtgctggtcgaagacaggcagggactcgagcagctggaccacgggcacgacggcggccgaagccacgtgaaaccggcggtcgttgttgtcgctggcctgtagagccttggcgctgtatacggccccccggtaaaagtactccttaaccgcgccctcgatcgcccgacgggcctgggtccgcacctcctccagccgaacctgaacggcctcggggcccagggggggtgggcgcggagccccctgcggggccgccccggccggggcgggcattacgccgaggggcccggcgtgctgtgagaccgcgtcgaccccgcgagcgagggcgtcgagggcctcgcgcatctggcgatcctccgcctccaccctaatctcttcgccacgggcaaatttggccagagcctggactctatacagaagcggttctgggtgcgtcggggtggcgggggcaaaaagggtgtccgggtgggcctgcgagcgctccagaagccactcgccgaggcgtgtatacagattggccggcggggccgcgcgaagctgcagctccaggtccgcgagttccccgtaaaaggcgtccgtctcccgaatgacatccctagccacaaggatcagcttcgccagcgccaggcgaccgatcagagagttttcgtccagcacgtgctggacgaggggcagatgggcggccacgtcggccaggctcaggcgcgtggaggccagaaagtcccccacggccgttttccagggcagcatgttcagggtaaactccagcagggcggcggccgggccggccaccccggcctgggtgtgcgtccgggccccgttctcgatgagaaaggcgaggacgcgttcaaagaaaaaaataacacagagctccagcagccccggagaggccggatacggcgaccgtaaggcgctgatggtgagccgcgaacacgcggcgacctcgcgggccagggcggcggagcacgcggtgaacttaaccgccgtggcggccacgtttgggtgggcctcgaacagctgggcgaggtctgcgcccgggggctcgggcgagcggcgagtcttcagcgcctcgagggcctgtgaggacgccggaaccgtgggcccgtcgtcctcgcccgcctcggcgaccggcggcccggccgggtcggggggtgccgaggcgaggacaggctccggaacggaggcggggaccgcggccccgacgggggttttgcctttgggggtggatttcttcttggttttggcagggggggccgagcgtttcgttttctcccccgaagtcaggtcttcgacgctggaaggcggagtccaggtgggtcggcggcgcttgggaaggccggccgagtagcgtgcccggtgccgaccaaccgggacgacgcccatctccaggacccgcatgtcgtcgtcatcttcttcggccgcctctgcggcgggggtcttgggggcggagggaggcggtggtgggatcgcggagggtgggtcggcggagggtgggtcggcggaggggggatccgtgggtggggtacccttcagggccaccgcccatacatcgtcgggcgcccgattcgggcgcttggcctctggttttgccgacggaccggccgtcccccgggatgtctcggaggccctgtcgtcgcgacgggcccgggtcggtggcggcgactgggcggctgtgggcgggtgtggccccgggccccctaccccctcccgggggcccacgccgacgcagggctcccccaggcccgcgatctcgccccgcagggggtgcgtgatggccacgcgccgttcgctgaacgcttcgtcctgcaggtaagtctcgctggccccgtaaagatgcagagccgcggccgtcaagtccgcaggagccgcgggttccgggcccgacggcacgaaaaacaccatggctcccgcccaccgtacgtccgggcgatcgcgggtgtaatacgtcaggtatggatacatgtcccccgcccgcactttggcgatgaacgcgggggtgccctccggaaggccgtgcgggtcaaaaaggtatgcggtgtcgccgtccctgaacagccccatccctagggggccaatggttaggagcgtgtacgacagggggcgcagggcccacgggccggcgaagaacgtgtgtgcggggcattgtgtctccagcaggcccgccgcgggctccccgaagaagcccacctcgccgtatacgcgcgagaagacacagcgcagtccgccgcgcgcccctgggtactcgaggaagttggggagctcgacgatcgaacacatgcgcggcggcccagggcccgcggtcgcgcgcgtccactcgcccccctcgaccaaacatccctcgatggcctccgcggacaggacgtcgcgagggcccacatcaaatatgaggctgagaaaggacagcgacgagcgcatgcacgataccgacccccccggctccaggtcgggcgcgaactggttccgagcaccggtgaccacgatgtcgcgatcccccccgcgttccatcgtggagtgcggtggggtgcccgcgatcatatgtgccctgctggccagagacccggcctgtttatggaccggacccccggggttagtgttgtttccgccacccatgcccccgtaccatggccccggttcccctgattaggctacgagtcgcggtgatcgcttcccaaaaaccgagctgcgtttgtctgtcttggtcttccacccccccccccgcccgcccgcacaccataacaccgagaacaacacacgggggtgggcgtaacataataaagctttattggtaactagttaacggcaagtccgtgggtggcgcgacggtgtcctccgggatcatctcgtcgtcctcgacgggggtgttggaatgaggcgccccctcgcggtccgcctggcgtgggccgtgcccataggcctccggcttctgtgcgtccatgggcataggcgcggggagactgtttccggcgtcgcggacctccaggtccctgggagactccggtccggctaacggacgaaacgcggaagcgcgaaacacgccgtcggtgacccgcaggagctcgttcatcagtaaccaatccatactcagcgtaacggccagcccctggcgagacagatccacggagtccggaaccgcggtcgtctggcccagggggccgaggctgtagtccccccaggcccctaggtcgcgacggctcgtaagcacgacgcggtcggccgcggggctttgcgggggggcgtcctcgggcgcatgcgccattacctctcggatggccgcggcgcgctggtcggccgagctgaccaagggcgccacgaccacggcgcgctccgtctgcaggcccttccacgtgtcgtggagttcctggacaaactcggccacgggctcgggtcccgcggccgcgcgcgcggcttgatagcaggccgacagacgccgccagcgcgctagaaactgacccatgaagcaaaacccggggacctggtctcccgacagcagcttcgacgcccgggcgtgaatgccggacacgacggacagaaacccgtgaatttcgcgccggaccacggccagcacgttgtcctcgtgcgacacctgggccgccagctcgtcgcacacccccaggtgcgccgtggtttcggtgatgacggaacgcaggctcgcgagggacgcgaccagcgcgcgcttggcgtcgtgatacatgctgcagtactgactcaccgcgtcccccatggcctcggggggccagggccccaggcggtcgggcgtgtccccgaccaccgcatacaggcggcgcccgtcgctctcgaaccgacactcgaaaaaggcggagagcgtgcgcatgtgcagccgcagcagcacgatggcgtcctccagttggcgaatcagggggtctgcgcgctcggcgaggtcctgcagcaccccccgggcggccagggcgtacatgctaatcaacaggaggctggtgcccacctcggggggcggggggggctgcagctggaccaggggccgcagctgctcgacggcacccctggagatcacgtacagctcccggagcagctgctctatgttgtcggccatctgcatagtggggccgaggccgccccgggcggccggttcgaggagggtgatcagcgcgcccagtttggtgcgatggccctcaaccgtggggagatagcccagcccaaagtcccgggcccaggccaacacacgcagggcgaactcgaccgggcggggaaggtaggccgcgctacacgtggccctcagcgcgtccccgaccaccagggccagaacgtaggggacgaagcccgggtcggcgaggacgttggggtgaatgccctcgagggcggggaagcggatctgggtcgccgcggccaggtggacagagggggcgtggctgggctgcccgacggggagaagcgcggacagcggcgtggccggggtggtgggggtgatgtcccagtgggtctgaccatacacgtcgatccagatgagcgccgtctcgcggagaaggctgggttgaccggaactaaagcggcgctcggccgtctcaaactcccccacgagcgcccgccgcaggctcgccagatgttccgtcggcacggccggacccatgatacgcgccagcgtctggcttagaacgccccccgacaggccgaccgcctcgcagagccgcccgtgcgtgtgctcgctggcgccctggacccgcctgaaagtttttacgtagttggcatagtacccgtattcccgcgccaacccaaacacgttcgaccccgcgagggcaatgcacccaaagagctgctggacttcgccgagtccgtggccggtgggcgtccgcgcggggacgcccgccgccagaaacccctccagggccgaaaggtagtgcgtgcagtgcgagggcgtgaacccagcgtcgatcagggtgttgatcaccacggagggcgaattggtattctggatcaacgtccacgtctgctgcagcagagccagcagccgctgctgggcgccggcggagggctgctccccgagctgcagcaggctggagacggcaggctggaagactgccagtgccgacgaactcaggaacggcacgtcgggatcaaacacggccacgtccgtccgcacgcgcgccattagcgtccccgggggcgcacaggccgagcgcgggctgacgcggctgagggccgtcgacacgcgcacctcctcgcggctgcgaaccatcttgttggcctcgagcggcggaatcattatggccgggtcgatctcccgcacggtgtgctgaaactgcgccaacaggggcggcgggaccacagccccccgctcgggggtcgtcaggtactcgtccaccagggccaacgtaaagagggcccgtgtgaggggagtgagggtcgcgtcgtctatgcgctggaggtgcgccgagaacagcgtcacccgattactcaccagggccaagaaccggaggccctcttgcacgaacggggcggggaagagcaggctgtacgccggggtggtaaggttcgcgctgggctgccccaacgggaccggcgccatcttgagcgacgtctccccaagggcctcgatggaggtccgcgggctcatggccaagcagctcttggtgacggtttgccagcggtctatccactccacggcgcactggcggacgcggaccggccccagggccgccgcggtgcgcaggccggcggaatccagcgcatgggacgtgtcggagccggtgaccgcgaggatggtgtccttgatgacctccatctcccggaaggcctggtcgggggcctcggggagagccaccaccaagcggtgtacgagcaacccggggaggttctcggccaagagcgccgtctccggaagcccgtgggcccggtggagcgcgcacaggtgttccagcagcggccgccagcagtcccgcgcgtctgccggggcgatggccgttcccgacaacagaaacgccgccatggcggcgcgcagcttggccgtggccagaaacgccgggtcgtccgccccgtttgccgtctcggccgtgggggttggcggttggcgaaggccggctaggctcgccaataggcgctgcataggtccgtccgagggcggaccggcgggtgaggtcgtgacgacgggggcctcggacgggagaccgcggtctgccatgacgcccggctcgcgtgggtgggggacagcgtagaccaacgacgagaccgggcgggaatgactgtcgtgcgctgtagggagcggcgaattatcgatcccccgcggccctccaggacccccgcaggcgttgcgagtaccccgcgtcttcgcggggtgttatacggccacttaagtcccggcatcccgttcgcggacccaggcccgggggattgtccggatgtgcgggcagcccggacggcgtgggttgcggactttctgcggggcggcccaaatggccctttaaacgtgtgtatacggacgcgccgggccagtcggccaacacaacccaccggaggcggtagccgcgtttggctgtggggtgggtggttccgccttgcgtgagtgtcctttcgacccccccccccctccctcccccgggtcttgctaggtcgcgatctggggtcgcaatgaagaccaatccgctacccgcaaccccttccgtgtggggcgggagtaccgtggaactcccccccacaacacgcgataccgcgggacagggcctgcttcggcgcgtcctgcgccccccgatctctcgccgcgacggcccagggctccccagggggtcgggaccccggagggcggccagcacgctgtggttgcttggcctggacggcacagacgcgccccctggggcgctgacccccaacgacgataccgaacaggccctggacaagatcctgcggggcaccatgcgcgggggggcggccctgatcggctccccgcgccatcatctaacccgccaagtgatcctgacggatctgtgccaacccaacgcggatcgtgctgggacgctgcttctggcgctgcggcaccccgccgacctgcctcacctggcccaccagcgcgccccgccaggccggcagaccgagcggctgggcgaggcctggggccagctgatggaggcgaccgccctggggtcggggcgagccgagagcgggtgcacgcgcgcgggcctagtgtcgtttaacttcctggtggcggcgtgtgccgcctcgtacgacgcgcgcgacgccgccgatgcggtacgggcccacgtcacggccaactaccgcgggacgcgggtgggggcgcgcctggatcgtttttccgagtgtctgcgcgccatggttcacacgcacgtcttcccccacgaggtcatgcggtttttcggggggctggtgtcgtgggtcacccaggacgagctagcgagcgtcaccgccgtgtgcgccgggccccaggaggcggcgcacaccggccacccgggccggccccgctcggccgtgatcctcccggcatgtgcgttcgtggacctggacgccgagctggggctggggggcccgggcgcggcgtttctgtacctggtattcacttaccgccagcgccgggaccaggagctgtgttgtgtgtacgtgatcaagagccagctccccccgcgcgggttggagccggccctggagcggctgtttgggcgcctccggatcaccaacacgattcacggcaccgaggacatgacgcccccggccccaaaccgaaaccccgacttccccctcgcgggcctggccgccaatccccaaaccccgcgttgctcggctggccaggtcacgaacccccagttcgccgacaggctgtaccgctggcagccggacctgcgggggcgccccaccgcacgcacctgtacgtacgccgcctttgcagagctcggcatgatgcccgaggatagtccccgctgcctgcaccgcaccgagcgctttggggcggtcagcgtccccgttgtcattctggaaggcgtggtgtggcgccccggcgagtggcgggcatgcgcgtgagcgtagcaaacgccccgcccacacaacgctccgcccccaaccccttccccgctgtcactcgttgttcgttgacccgggcgtccgccaaataaagccactgaaacccgaaacgcgagtgttgtaacgtcctttgggcgggaggaagccacaaaatgcaaatgggatacatggaaggaacacacccccgtgactcaggacatcggtgtgtccttttgggtttcactgaaactggcccgcgccccacccctgcgcgatgtggataaaaagccagcgcgggtggtttagggtaccacaggtgggtgctttggaaacttgccggtcgccgtgctcctgtgagcttgcgtccctccccggtttcctttgcgctcccgccttccggacctgctctcgcctactcttctttggctctcggtgcgattcgtcaggcagcggccttgtcgaatctcgaccccaccactcgccggacccgccgacgtcccctctcgagcccgccgaaacccgccgcgtctgttgaaatggccagccgcccagccgcatcctctcccgtcgaagcgcgggccccggttgggggacaggaggccggcggccccagcgcagccacccagggggaggccgccggggcccctctcgcccacggccaccacgtgtactgccagcgagtcaatggcgtgatggtgctttccgacaagacgcccgggtccgcgtcctaccgcatcagcgataacaactttgtccaatgtggttccaactgcaccatgatcatcgacggagacgtggtgcgcgggcgcccccaggacccgggggccgcggcatcccccgctcccttcgttgcggtgacaaacatcggagccggcagcgacggcgggaccgccgtcgtggcattcgggggaaccccacgtcgctcggcggggacgtctaccggtacccagacggccgacgtccccaccgaggcccttgggggcccccctcctcctccccgcttcaccctgggtggcggctgttgttcctgtcgcgacacacggcgccgctctgcggtattcgggggggagggggatccagtcggccccgcggagttcgtctcggacgaccggtcgtccgattccgactcggatgactcggaggacacggactcggagacgctgtcacacgcctcctcggacgtgtccggcggggccacgtacgacgacgcccttgactccgattcgtcatcggatgactccctgcagatagatggccccgtgtgtcgcccgtggagcaatgacaccgcgcccctggatgtttgccccgggacccccggcccgggcgccgacgccggtggtccctcagcggtagacccacacgcgccgacgccagaggccggcgctggtcttgcggccgatcccgccgtggcccgggacgacgcggaggggctttcggacccccggccacgtctgggaacgggcacggcctaccccgtccccctggaactcacgcccgagaacgcggaggccgtggcgcgctttctgggagatgccgtgaaccgcgaacccgcgctcatgctggagtacttttgccggtgcgcccgcgaggaaaccaagcgtgtcccccccaggacattcggcagcccccctcgcctcacggaggacgactttgggcttctcaactacgcgctcgtggagatgcagcgcctgtgtctggacgttcctccggtcccgccgaacgcatacatgccctattatctcagggagtatgtgacgcggctggtcaacgggttcaagccgctggtgagccggtccgctcgcctttaccgcatcctgggggttctggtgcacctgcggatccggacccgggaggcctcctttgaggagtggctgcgatccaaggaagtggccctggattttggcctgacggaaaggcttcgcgagcacgaagcccagctggtgatcctggcccaggctctggaccattacgactgtctgatccacagcacaccgcacacgctggtcgagcgggggctgcaatcggccctgaagtatgaggagttttacctaaagcgttttggcgggcactacatggagtccgtcttccagatgtacacccgcatcgccggctttttggcctgccgggccacgcgcggcatgcgccacatcgccctggggcgagaggggtcgtggtgggaaatgttcaagttctttttccaccgcctctacgaccaccagatcgtaccgtcgacccccgccatgctgaacctggggacccgcaactactacacctccagctgctacctggtaaacccccaggccaccacaaacaaggcgaccctgcgggccatcaccagcaacgtcagtgccatcctcgcccgcaacgggggcatcgggctatgcgtgcaggcgtttaacgactccggccccgggaccgccagcgtcatgcccgccctcaaggtccttgactcgctggtggcggcgcacaacaaagagagcgcgcgtccgaccggcgcgtgcgtgtacctggagccgtggcacaccgacgtgcgggccgtgctccggatgaagggggtcctcgccggcgaagaggcccagcgctgcgacaatatcttcagcgccctctggatgccagacctgtttttcaagcgcctgattcgccacctggacggcgagaagaacgtcacatggaccctgttcgaccgggacaccagcatgtcgctcgccgactttcacggggaggagttcgagaagctctaccagcacctcgaggtcatggggttcggcgagcagatacccatccaggagctggcctatggcattgtgcgcagtgcggccacgaccgggagccccttcgtcatgttcaaagacgcggtgaaccgccactacatctacgacacccagggggcggccatcgccggctccaacctctgcaccgagatcgtccatccggcctccaagcgatccagtggggtctgcaacctgggaagcgtgaatctggcccgatgcgtctccaggcagacgtttgactttgggcggctccgcgacgccgtgcaggcgtgcgtgctgatggtgaacatcatgatcgacagcacgctacaacccacgccccagtgcacccgcggcaacgacaacctgcggtccatgggaatcggcatgcagggcctgcacacggcctgcctgaagctggggctggatctggagtctgccgaatttcaggacctgaacaaacacatcgccgaggtgatgctgctgtcggcgatgaagaccagcaacgcgctgtgcgttcgcggggcccgtcccttcaaccactttaagcgcagcatgtatcgcgccggccgctttcactgggagcgctttccggacgcccggccgcggtacgagggcgagtgggagatgctacgccagagcatgatgaaacacggcctgcgcaacagccagtttgtcgcgctgatgcccaccgccgcctcggcgcagatctcggacgtcagcgagggctttgcccccctgttcaccaacctgttcagcaaggtgacccgggacggcgagacgctgcgccccaacacgctcctgctaaaggaactggaacgcacgtttagcgggaagcgcctcctggaggtgatggacagtctcgacgccaagcagtggtccgtggcgcaggcgctcccgtgcctggagcccacccaccccctccggcgattcaagaccgcgtttgactacgaccagaagttgctgatcgacctgtgtgcggaccgcgccccctacgtcgaccatagccaatccatgaccctgtatgtcacggagaaggcggacgggaccctcccagcctccaccctggtccgccttctggtccacgcatataagcgcggactaaaaacagggatgtactactgcaaggttcgcaaggcgaccaacagcggggtctttggcggcgacgacaacattgtctgcatgagctgcgcgctgtgaccgacaaaccccctccgcgccaggcccgccgccactgtcgtcgccgtcccacgctctcccctgctgccatggattccgcggccccagccctctcccccgctctgacggcccttacggaccagagcgcgacggcggacctggcgatccagattccaaagtgccccgaccccgagaggtacttctacacctcccagtgtcccgacattaaccacctgcgctccctcagcatccttaaccgctggctggaaaccgagcttgttttcgtgggggacgaggaggacgtctccaagctttccgagggcgagctcagcttttaccgcttcctcttcgctttcctgtcggccgccgacgacctggttacggaaaacctgggcggcctctccggcctgtttgagcagaaggacattctccactactacgtggagcaggaatgcatcgaagtcgtacactcgcgcgtgtacaacatcatccagctggtgcttttccacaacaacgaccaggcgcgccgcgagtacgtggccggtaccatcaaccacccggccatccgcgccaaggtggactggttggaagcgcgggtgcgggaatgcgcctccgttccggaaaagttcattctcatgatcctcatcgagggcatcttttttgccgcctcgtttgccgccatcgcctaccttcgcaccaacaaccttctgcgggtcacctgccagtcaaacgacctcatcagccgggacgaggccgtgcacacgacggcctcgtgttacatctacaacaactacctcggcgggcacgccaagcccccgcccgaccgcgtgtacgggctgttccgccaggcggtcgagatcgagatcggatttatccgatcccaggcgccgacggacagccatatcctgagcccggcggcgctggcggccatcgaaaactacgtgcgattcagcgcggatcgcctgttgggccttatccacatgaagccactgttttccgccccaccccccgacgccagctttccgctgagcctcatgtccaccgacaaacacaccaattttttcgagtgtcgcagcacctcctacgccggggcggtcgtcaacgatctgtgagtgtcgcggcgcgcttctacccgtgtttgcccataataaacctctgaaccaaactttgggtctcattgtgattcttgtcagggacgcgggggtgggagaggataaaaggcggcgcaaaaagcagtaaccaggtccgtccagattctgcgggcataggataccataattttattggtgggtcgtttgttcggggacaagcgcgctcgtctgacgtttgggctactcgtcccagaatttggccaggacgtccttgtagaacgcgggtgggggggcctgggtccgcaactgctccagaaacctgtcggcgatatcaggggccgtgatatgccgggtcacgatagatcgcgccaggttttcgtcgcggatgtcctggtagataggcaggcgtttcagaagagtccacggcccccgctccttggggccgataagcgatatgacgtacttaatgtagcggtgttccaccagctcggtgatggtcatgggatcggggagccagtccagggactctggggcgtcgtggatgacgtggcgtcgcgggttggccacataactgcggtgctcttccagcagctgcgcgttcgggacctggacgagctcgggcggggtgagtatctccgaggaggacgacctggggccggggtggcccccggtaacgtcccggggatccagggggaggtcctcgtcgtcttcgtatccgccggcgatctgttgggttagaatttcggtccacgagacgcgcgtctcggtgccgccggcggccggcggcagagggggcctggtttccgtggagcgcgagctggtgtgttcccggcggatggcccgccgggtctgagagcgactcgggggggtccagtgacattcgcgcagcacatcctccacggaggcgtaggtgttattgggatggaggtcggtgtggcagcggacaaagagggccaggaactgggggtagctcatcttaaagtactttagtatatcgcgacagttgatcgtgggaatgtagcaggcgctaatatccaacacaatatcacagcccatcaacaggaggtcagtgtccgtggtgtacacgtacgcgaccgtgttggtgtgatagaggttggcgcaggcatcgtccgcctccagctgacccgagttaatgtaggcgtaccccagggcccggagaacgcgaatacagaacagatgcgccagacgcagggccggcttcgagggcgcggcggacggcagcgcggctccggacccggccgtcccccgggtccccgaggccagagaggtgccgcgccggcgcatgttggaaaaggcagagctgggtctggagtcggtgatgggggaaggcggtggagaggcgtccacgtcactggcctcctcgtccgtccggcactgggccgtcgtgcgggccaggatggccttggctccaaacacaaccggctccatacaattgaccccgcgatcggtaacgaagatggggaaaagggacttttgggtaaacacctttaataagcgacagaggcagtgtagcgtaatggcctcgcggtcgtaactggggtatcggcgctgatatttgaccaccaacgtgtacatgacgttccacaggtccacggcaatgggggtgaagtacccggccggggccccaaggccccggcgcttgaccagatggtgtgtgtgggcaaacttcatcatcccgaacaaacccatgtcaggtcaattgtaactgcggatcggcctaactaaggcgtggttggtgcgacggtccgggacacccgagcctgtctctctgtgtatggtgacccagacaacaacaccgacacaagaggacaataatccgttaggggacgctctttataatttcgatggcccaactccacgcggattggtgcagcaccctgcatgcgccggtgcgggccaaccttccccccgctcattgcctcttccaaaagggtgtggcctaacgagctgggggcgtatttaatcaggctagcgcggcgggcctgccgtagtttctggctcggtgagcgacggtccggttgcttgggtcccctggctgccatcaaaaccccaccctcgcagcggcatacgccccctccgcgtcccgcacccgagaccccggcccggctgccctcaccaccgaagcccacctcgtcactgtggggtgttcccagcccgcgttgggatgacggattcccctggcggtgtggcccccgcctcccccgtggaggacgcgtcggacgcgtccctcgggcagccggaggagggggcgccctgccaggtggtcctgcagggcgccgaacttaatggaatcctacaggcgtttgccccgctgcgcacgagccttctggactcgcttctggttatgggcgaccggggcatccttatccataacacgatctttggggagcaggtgttcctgcccctggaacactcgcaattcagtcggtatcgctggcgcggacccacggcggcgttcctgtctctcgtggaccagaagcgctccctcctgagcgtgtttcgcgccaaccagtacccggacctacgtcgggtggagttggcgatcacgggccaggccccgtttcgcacgctggttcagcgcatatggacgacgacgtccgacggcgaggccgttgagctagccagcgagacgctgatgaagcgcgaactgacgagctttgtggtgctggttccccagggaacccccgacgttcagttgcgcctgacgaggccgcagctcaccaaggtccttaacgcgaccggggccgatagtgccacgcccaccacgttcgagctcggggttaacggcaaattttccgtgttcaccacgagtacctgcgtcacctttgctgcccgcgaggagggcgtgtcgtccagcaccagcacccaggtccagatcctgtccaacgcgctcaccaaggcgggccaggcggccgccaacgccaagacggtgtacggggaaaatacccatcgcaccttctctgtggtcgtcgacgattgcagcatgcgggcggtgctccggcgactgcaggtcggcgggggcaccctcaagttcttcctcacgacccccgtccccagtctgtgcgtcaccgccaccggtcccaacgcggtatcggcggtatttctcctgaaaccccagaagatttgcctggactggctgggtcatagccaggggtctccttcagccgggagctcggcctcccgggcctctgggagcgagccaacagacagccaggactccgcgtcggacgcggtcagccacggcgatccggaagacctcgatggcgctgcccgggcgggagaggcgggggccttgcatgcctgtccgatgccgtcgtcgaccacgcgggtcactcccacgaccaagcgggggcgctcggggggcgaggatgcgcgcgcggacacggccctaaagaaacctaagacggggtcgcccaccgcacccccgcccgcagatccagtccccctggacacggaggacgactccgatgcggcggacgggacggcggcccgtcccgccgctccagacgcccggagcggaagccgttacgcgtgttactttcgcgacctcccgaccggagaagcaagccccggcgccttctccgccttccgggggggcccccaaaccccgtatggttttggattcccctgacggggcggggccttggcggccgcccaactctcgcaccatcccgggttaatgtaaataaacttggtattgcccaacactttcccgcgtgtcgcgtgtggttcatgtgtgtgcctggcgcccccaccctcgggttcgtgtatttcctttccctgtccttataaaagccgtatgtggggcgtgacggaaccaccccgcgtgccatcacggccaaggcgcgggatgctccgcaacgacagccaccgggccgtgtccccggaggacggccagggacgggtcgacgacggacggccacacctcgcgtgcgtgggggccctggcgcgggggttcatgcatatctggcttcaggccgccacgctgggttttgcgggatcggtcgttatgtcgcgcgggccgtacgcgaatgccgcgtctggggcgttcgccgtcgggtgcgccgtgctgggctttatgcgcgcaccccctcccctcgcgcggcccaccgcgcggatatacgcctggctcaaactggcggccggtggagcggcccttgttctgtggagtctcggggagcccggcacgcagccgggggccccggccccgggcccggccacccagtgcctggcactgggcgccgcctatgcggcgctcctggtgctcgccgatgacgtctatccgctctttctcctcgccccggggcccctgttcgtcggcaccctggggatggtcgtcggcgggctgacgatcggaggcagcgcgcgctactggtggatcggtgggcccgccgcggccgccctggccgcggcggtgttggcgggcccgggggcgaccaccgccagggactgcttttccagggcttgccccgaccaccgccgcgtctgtgtcatcaccgcaggcgagtctctttcccgccgccccccggaggacccagagcgacccggggttcccgggcccccgtcccccccgaccccccaacgatcccacgggccgccggccgatgaggtcgcaccggccagggtcgcgcggcccgaaaacgtctgggtgcccgtggtcacctttctgggggcgggcgcgcttgccgtcaagacggtgcgagaacatgcccggggaacgccgggcccgggcctgccgctgtggccccaggtgtttctcggaggccatgtggcggtggccctgacggagctgtgtcaggcgcttccgccctgggaccttacggacccgctgctgtttgttcacgccggactgcaggtcatcaacctcgggttggtgtttcggttttccgaggttgtcgtgtatgcggcgctagggggtgccgtgtggatttcgttggcgcaggtgctggggctccggcgtcgcctgcacaggaaggaccccggggacggggcccggttggcggcgacgcttcggggcctcttcttctccgtgtacgcgctggggtttggggtgggggtgctgctgtgccctccggggtcaacgggcgggcggtcgggcgattgatatatttttcaataaaaggcattagtcccgaagaccgccggtgtgtgatgatttcgccataacacccaaaccccggatggggcccgggtataaattccggaaggggacacgggctaccctcactatcgagggcgcttggtcgggaggccgcatcgaacgcacacccccatccggtggtccgtgtggaggtcgttttcatgcccggtctcgctttgccgggaacgctagccgatccctcgcgagggggaggcgtcgggcatggccccggggcgggtgggccttgccgtggtcctgtggagcctgttgtggctcggggcgggggtgtccgggggctcggaaactgcctccaccgggcccacgatcaccgcgggagcggtgacgaacgcgagcgaggcccccacatcggggtcccccgggtcagccgccagcccggaggtcacccccacatcgaccccaaaccccaacaatgtcacacaaaacaaaaccacccccaccgagccggccagccccccaacaacccccaagcccacctccacgcccaaaagcccccccacgtccacccccgaccccaaacccaagaacaacaccacccccgccaagtcgggccgccccactaaaccccccgggcccgtgtggtgcgaccgccgcgacccattggcccggtacggctcgcgggtgcagatccgatgccggtttcggaattccacccgcatggagttccgcctccagatatggcgttactccatgggtccgtcccccccaatcgctccggctcccgacctagaggaggtcctgacgaacatcaccgccccacccgggggactcctggtgtacgacagcgcccccaacctaacggacccccacgtgctctgggcggagggggccggcccgggcgccgaccctccgttgtattctgtcaccgggccgctgccgacccagcggctgattatcggcgaggtgacgcccgcgacccagggaatgtattacttggcctggggccggatggacagcccgcacgagtacgggacgtgggtgcgcgtccgcatgttccgccccccgtctctgaccctccagccccacgcggtgatggagggtcagccgttcaaggcgacgtgcacggccgccgcctactacccgcgtaaccccgtggagtttgtctggttcgaggacgaccaccaggtgtttaacccgggccagatcgacacgcagacgcacgagcaccccgacgggttcaccacagtctctaccgtgacctccgaggctgtcggcggccaggtccccccgcggaccttcacctgccagatgacgtggcatcgcgactccgtgacgttctcgcgacgcaatgccaccgggctggccctggtgctgccgcggccaaccatcaccatggaatttggggtccgcattgtggtctgcacggccggctgcgtccccgagggcgtgacgtttgcctggttcctgggggacgacccctcaccggcggctaagtcggccgttacggcccaggagtcgtgcgaccaccccgggctggctacggtccggtccaccctgcccatttcgtacgactacagcgagtacatctgtcggttgaccggatatccggccgggattcccgttctagaacaccacggcagtcaccagcccccacccagggaccccaccgagcggcaggtgatcgaggcgatcgagtgggtggggattggaatcggggttctcgcggcgggggtcctggtcgtaacggcaatcgtgtacgtcgtccgcacatcacagtcgcggcagcgtcatcggcggtaacgcaagacccccccgttacctttttaatatctatatagtttggtcccccctctatcccgcccaccgctgggcgctataaagccgccaccctctcttccctcaggtcatccttggtcgatcccgaacgacacacggcgtggagcaaaacgcctccccctgagccgctttcctaccaacacaacggcatgcctctgcgggcatcggaacacgcctaccggcccctgggccccgggacaccccccatgcgggctcggctccccgccgcggcctgggttggcgtcgggaccatcatcgggggagttgtgatcattgccgcgttggtcctcgtgccctcgcgggcctcgtgggcactttccccatgcgacagcggatggcacgagttcaacctcgggtgcatatcctgggatccgacccccatggagcacgagcaggcggtcggcggctgtagcgccccggcgaccctgatcccccgcgcggctgccaaacagctggccgccgtcgcacgcgtccagtcggcaagatcctcgggctactggtgggtgagcggagacggcattcgggcctgcctgcggctcgtcgacggcgtcggcggtattgaccagttttgcgaggagcccgcccttcgcatatgctactatccccgcagtcccgggggctttgttcagtttgtaacttcgacccgcaacgcgctggggctgccgtgaggcgcgtgtactgcggtctgtctcgtctcctcttctccccttccctccccctccgcatcccaggatcacaccggtcaacgagggttgggggggtccggcacggacccaaaataataaacacacaatcacgtgcgataaaaagaacacgcggtcccctgtggtgtttttggttatttttattaaatctcgtcgacaaacagggggaaaggggcgtggtctagcgacggcagcacgggcggaggcgttcaccggctccggcgtccttcgcgtttaagcttggtcaggagggcgctcagggcggcgacgttggtcgggccgtcgttggtcagggcgttggctcgatggcgggcgaggacgggcgaggggctcaacggcgggggcgggggcccggtgcggcccgggggggaaaatagggcggatcccccccagtcgtacaggggattttccgcctcaatgtacggggaggccggcgctgcattcgccgtgttcacgcagacgttttcgtagacccgcatccatggtatttcctcgtagacacgccccccgtcctcgctcaccgtctcgtatattgactcgtcgtcctcgtagggggcgtgccgttcgcgggccgaggcggcgtgggtggctttgcggcgggcgtcgtcgtcgtcgtcgtcggccgtcagatacgtggcttccatctggtcgggttctccctccggggcgggtccccacacccgtggccgatcgaggctccccagagacgcgcgccggacgaggagggggcacgtcgccgccggcggtcgcctgtcgggtcccgcgacgttacgggccgggaggcgcgggggcacctcccccatgtgcgtgtaatacgtggccggctgtgtggccgcagcggggggctcggcgaccgggtcgttcgcatccggaagcgggggccccgcgccgtccgcgcggcgcctccggaacctccgggtggacgcgggggtcgagtgtaggcgaggtcgggggaggggcgggggctcgttgtcgcgccgcgcccgctgaatcttttcccgacaggtcccaccccccgcgcgatgcccccccgggccgctggccatgtcgtccgggggaggccccgcggaccacgtcgtccggcgagacgccacgagccgcaggatggactcgtagtggagcgacggcgccccgttgcggagcagatccgcggccagggcggccccgaaccaagccttgatgctcaactccatccgggcccagctgggggcggtcatcgtggggaacaggggggcggtggtccgacagaaacgctcctggctgtccaccgcggcccgcagatactcgttgttcaggctgtcggtggcccagacgccgtacccggtgagggtcgcgttgatgatatactgggcgtggtgatggacgatcgacagaacctccaccgtggatacgacggtatccacggtcccgtacgtaccgccgctccgcttgccggtctgccacaggttggctaggcgcgtcaggtggcccaggacgtcgctgaccgccgccctgagcgccatgcactgcatggagccggtcgtgccgctgggaccccggtccagatggcgcgcgaacgtttccgcgggcgcctccgggctgccgccgagcgggaggaaccggcgattggagggactcagccggtgacatacgtgcttgtccgtcgtccacagcatccaggacgcccaccggtacagcacggagacgtaggccaggagctcgttgagccgcagtgcggtgtcggtgctggggcggcttgggtccgccgggcgcataaagaacatgtactgctgaatccgatggagggcgtcgcgcaggccggccacggtggcggcgtacttggccgccacggccccgctcttgaacggggtgcgcgccagcagctttggcgccagggtgggccgcagcagcacgtgaaggctggggtcgcagtcgcccacggggtcctcggggacgtccaggccgctgggcaccaccgtctgcaggtacttccagtactgcgtgaggatggcgcggctcaactggccgccgggcagctccacctcgcccagcgcctgggtggcggccgaagcgtagtgccggatgtactcgtagtgcgggtcgctggcgagcccgtccacgatcaaactctcgggaaccgtgttgtgttgccgcgcggccaaccggacgctgcgatcggtgcaggtcagaaacgccggctgcgcgtcgtcggagcgctgccgcaaggcgcccacggccgcgctaaggagcccctccggggtggggagcagacacccgccgaagatgcgccgctcgggaacgcccgcgttgtcgccgcggatcaggttggcaggcgtcaggcaccgcgccagccgcagggagctcgcgccgcgcgtccggcgctgcatggtgacgcccgttcggtcgggacccgccggtcggagttatgccgcgtccagggccatcggggcgctttttatcgggaggagcttatgggcgtggcgggcctcccagcccggtcgcgcgcctccccgacacgtgcgcccgcagggcggcggccccctcgtctcccatcagcagtttcctaaactgggacatgatgtccaccacgcggacccgcgggcccaacacggacccgccgcttacgggggcgggggggaagggctccaggtccttgagaagaaaggcggggtctgccgtcccggacacgggggcccggggcgctgaggaggcggggcgcagatccacgtgctccgcggccgcgcggacgtccgcccagaacttggcgggggtggtgcgcgcgtacaggggctgggtcgctcggaggacgcacgcgtagcgcaggggggtgtacgtgcccacctcgggggccgtgaatcccccgtcaaacgcggccagtgtcacgcacgccaccacggtgtcggcaaagcccagcagccgctgcaggacgagcccggcggccagaatggcgcgcgtggccgccgcgtcgtcccggcgccggtgcgcgtccccgcacgcccgggcgtactttaaggtcacggtcgccagggccgtgtgcagcgcgtacaccgcagcgcccagcacggcgttgagcccgctgttggcgagcagccggcgcgctgcggtgtcgcccagcgcctcgtgctcggcccccacgaccgcggggcttcccaggggcagggcgcgaaacagctcctcccgcgccacgtccgcaaaggcggggtggtgcacgtgcgggtgcaggcgcgcccccacgaccaccgagagccactggaccgtctgctccgccatcaccgccagcacatccagcacgcgccccaggaaggcggcctcccgcgtcaaaacgcaccggacggcgtcgggattgaagcgggcgagcagggccccggtggccaggtacgtcatgcggccggcatagcgggcggccacgcgacagtcgcggtccagcagcgcgcgcaccccgggccagtacagcagggaccccagcgagctgcggaacaccgcggcgtcggggccggattggggggacactaacccccccgcgctcagtaacggcacggccgcggccccgacgggacgcaacgccgtgaggctcgcgaactgccgcctcagctcggccgccctgtcgtccaggtcagacccgcgcgcctccgcgtgaaggcgcgtcccgcacacccacccgttgatggccagccgcacgacggcatccgccaaaaagctcatcgcctgggcggggctggtttttgttcgacgatccgtcaggtcaagaatcccatcgcccgtgatataccaggccaacgcctcgccctgctgcagggtttggcggaaaaacaccgcggggttgtcgggggaggcgaagtgcatgacccccacgcgcgataacccgaacgcgctatccggacacgggtaaaacccggccggatgccccagggctagggcggagcgcacggactcgtcccacacggcaacctgaggggccagtcgatccaacgggaatgccgcccggagctccgggcccggcacgcgtccctccagaacctccaccttgggcggggaacgggccccgccgccgtcctccggcccgacggcttccgggtagtcgtcctcctcgtactgcagctcctctaggaacagcggcgacggcgccacccgcgaaccgccgacccgccccaaaatagcccgcgcgtcatcgaattcctgcagcccggggcgcgcccccacgaccaccgagagccactggaccgtctgccaattgaggtaaataacttcgtataggatactttatacgaagttataagcttctatcgattcacacaaaaaaccaacacacagatgtaatgaaaataaagatattttattctcgagtttacttgtaccagggtaatacgcgaaacagtcgactctagacttaattaatccttatcggattttaccacatttgtagaggttttacttgctttaaaaaacctcccacatctccccctgaacctgaaacataaaatgaatgcaattgttgttgttaacttgtttattgcagcttataatggttacaaataaagcaatagcatcacaaatttcacaaataaagcatttttttcactgcattctagttgtggtttgtccaaactcatcaatgtatcttatcatgtcggtaccgatatcttaaagcttgtgcacctcgactccagcaaatctaatgttgatggtgtatcccccgtcctccaggtcggcggtatacttgccatgctctttgctcagcaggtcggcatatctgtaagcctcggcggttgcttcagcaaaagttcccttgaaagtagctgtctgcacggtcccatcctcaaagtagatgttttccttgatggtgacctgctccttctcttcaggtttttcgtccactttcttcccggcgaatctaatattgattgtatacccgccatcctccaggtcagcagtgtacttgccgttctcctttgccagcagatcagcataccggtaggcctctgctgtagcttcggcaaaggtgcccttgaactcggcggtctgagtctttccgtcagcgtagatcaggttggccttgattgtcacctcttctttgggctcttctggggttttctccttcccggcaaacttgatattcagagtatagcctttatctgccacgtccactgtgtacttgccgttttctttggccagcagatctgcatagcggtatgcctcagcagtggcctcttcaaatgttcccttgaattcggctgtctgggttttcccgtctgcgtagatcagattagccttgatggtcacttcctctttaggctcttcgggagttttctccttgccagcgaacttaatattcagtgtgtatcccttatcggccacgtccacggtgtactccccattgtctttcttcagtgcgtcagcatatctgtaggcctctgcggtagcctcttcaaaagtccccttgaattcggcagtctgtgttttgccatcggcgtagatcaggtttgccttgatagtgacctcttcttttggctcttcaggtgttttttcctttcctgcaaacttgatattcagggtataccctttatcagccacgtccacagtgtactcgccgttatctttcttcagtgtgtcggcatatgcgtaagcctcgcttgtggccttttcaaaggtgcctttgaactctgcggtctgagttgatccattagcgaaaatcaggttggccttgatggtcacctcttcctcagagtcagtctcgggtgtttctggggtttcctccttattctcgactgtacaggcataatctggcacgtcataagggtaggatccgggacaaggggggcatgtgtgggtcttatcgcaagattttggctcgaggcgccttccccaccacctcaggtcccggtactgacaccgctccccggcgtagccgaccacacagttgcatgcataggagtccagtgcttcaatatacctgcacactccatcatggaggcagtacccatcgtaggaagggggacattcagagtaactattcaattgggcccacaccatgggccagaggagcagaagaagcagcaggagccaccacagcctccaccacatggtggcactagcagctggtacccagcttggaggtgcacaccaatgtggtgaatggtcaaatggcgtttattgtatcgagctaggcacttaaatacaattatctctgcaatgcggaattcagtggttcgtccaatccatgtcagacctgtctgttgccttcctaataaggcacgatcgtaccaccttacttccaccaatcggcatgcacggtgctttttctctccttgtaaggcatgttgctaactcatcgttaccatgttgcaagactacaagtgtattgcataagactacatttccccctccctatgcaaaagcgaaactactatatcctgaggggactcctaaccgcgtacaaccgaagccccgctgggcgcctaaacacaccctagtcccctcagatacgcgtatatctggcccgtacatcgcgaagcagcgcaaaacgcctaaccctaagcagattcttcatgcaattgtcggtcaagccttgccttgttgtagcttaaattttgctcgcgcactactcagcgacctccaacacacaagcagggagcagatactggcttaactatgcggcagcagagcagattgtactgagagtgcaccatacaagctcaggatctgcgatgataagctgtcaaacatgagaattggtcgaaacataacttcgtatagcatacattatacgaagttatttacctaagcttcctgcaggtgcatggtgacgcccgttcggtcgggacgggatcccccccagtcgtacaggggattttccgcctcaatgtacggggaggccggcgctgcattcgccgtgttcacgcagacgttttcgtagacccgcatccatggtatttcctcgtagacacgccccccgtcctcgctcaccgtctcgtatattgactcgtcgtcctcgtagggggcgtgccgttcgcgggccgaggcggcgtgggtggctttgcggcgggcgtcgtcgtcgtcgtcgtcggccgtcagatacgtggcttccatctggtcgggttctccctccggggcgggtccccacacccgtggccgatcgaggctccccagagacgcgcgccggacgaggagggggcacgtcgccgccggcggtcgcctgtcgggtcccgcgacgttacgggccgggaggcgcgggggcacctcccccatgtgcgtgtaatacgtggccggctgtgtggccgcagcggggggctcggcgaccgggtcgttcgcatccggaagcgggggccccgcgccgtccgcgcggcgcctccggaacctccgggtggacgcgggggtcgagtgtaggcgaggtcgggggaggggcgggggctcgttgtcgcgccgcgcccgctgaatcttttcccgacaggtcccaccccccgcgcgatgcccccccgggccgctggccatgtcgtccgggggaggccccgcggaccacgtcgtccggcgagacgccacgagccgcaggatggactcgtagtggagcgacggcgccccgttgcggagcagatccgcggccagggcggccccgaaccaagccttgatgctcaactccatccgggcccagctgggggcggtcatcgtggggaacaggggggcggtggtccgacagaaacgctcctggctgtccaccgcggcccgcagatactcgttgttcaggctgtcggtggcccagacgccgtacccggtgagggtcgcgttgatgatatactgggcgtggtgatggacgatcgacagaacctccaccgtggatacgacggtatccacggtcccgtacgtaccgccgctccgcttgccggtctgccacaggttggctaggcgcgtcaggtggcccaggacgtcgctgaccgccgccctgagcgccatgcactgcatggagccggtcgtgccgctgggaccccggtccagatggcgcgcgaacgtttccgcgggcgcctccgggctgccgccgagcgggaggaaccggcgattggagggactcagccggtgacatacgtgcttgtccgtcgtccacagcatccaggacgcccaccggtacagcacggagacgtaggccaggagctcgttgagccgcagtgcggtgtcggtgctggggcggcttgggtccgccgggcgcataaagaacatgtactgctgaatccgatggagggcgtcgcgcaggccggccacggtggcggcgtacttggccgccacggccccgctcttgaacggggtgcgcgccagcagctttggcgccagggtgggccgcagcagcacgtgaaggctggggtcgcagtcgcccacggggtcctcggggacgtccaggccgctgggcaccaccgtctgcaggtacttccagtactgcgtgaggatggcgcggctcaactggccgccgggcagctccacctcgcccagcgcctgggtggcggccgaagcgtagtgccggatgtactcgtagtgcgggtcgctggcgagcccgtccacgatcaaactctcgggaaccgtgttgtgttgccgcgcggccaaccggacgctgcgatcggtgcaggtcagaaacgccggctgcgcgtcgtcggagcgctgccgcaaggcgcccacggccgcgctaaggagcccctccggggtggggagcagacacccgccgaagatgcgccgctcgggaacgcccgcgttgtcgccgcggatcaggttggcaggcgtcaggcaccgcgccagccgcagggagctcgcgccgcgcgtccggcgctgcatggtgacgcccgttcggtcgggacccgccggtcggagttatgccgcgtccagggccatcggggcgctttttatcgggaggagcttatgggcgtggcgggcctcccagcccggtcgcgcgcctccccgacacgtgcgcccgcagggcggcggccccctcgtctcccatcagcagtttcctaaactgggacatgatgtccaccacgcggacccgcgggcccaacacggacccgccgcttacgggggcgggggggaagggctccaggtccttgagaagaaaggcggggtctgccgtcccggacacgggggcccggggcgctgaggaggcggggcgcagatccacgtgctccgcggccgcgcggacgtccgcccagaacttggcgggggtggtgcgcgcgtacaggggctgggtcgctcggaggacgcacgcgtagcgcaggggggtgtacgtgcccacctcgggggccgtgaatcccccgtcaaacgcggccagtgtcacgcacgccaccacggtgtcggcaaagcccagcagccgctgcaggacgagcccggcggccagaatggcgcgcgtggccgccgcgtcgtcccggcgccggtgcgcgtccccgcacgcccgggcgtactttaaggtcacggtcgccagggccgtgtgcagcgcgtacaccgcagcgcccagcacggcgttgagcccgctgttggcgagcagccggcgcgctgcggtgtcgcccagcgcctcgtgctcggcccccacgaccgcggggcttcccaggggcagggcgcgaaacagctcctcccgcgccacgtccgcaaaggcggggtggtgcacgtgcgggtgcaggcgcgcccccacgaccaccgagagccactggaccgtctgctccgccatcaccgccagcacatccagcacgcgccccaggaaggcggcctcccgcgtcaaaacgcaccggacggcgtcgggattgaagcgggcgagcagggccccggtggccaggtacgtcatgcggccggcatagcgggcggccacgcgacagtcgcggtccagcagcgcgcgcaccccgggccagtacagcagggaccccagcgagctgcggaacaccgcggcgtcggggccggattggggggacactaacccccccgcgctcagtaacggcacggccgcggccccgacgggacgcaacgccgtgaggctcgcgaactgccgcctcagctcggccgccctgtcgtccaggtcagacccgcgcgcctccgcgtgaaggcgcgtcccgcacacccacccgttgatggccagccgcacgacggcatccgccaaaaagctcatcgcctgggcggggctggtttttgttcgacgatccgtcaggtcaagaatcccatcgcccgtgatataccaggccaacgcctcgccctgctgcagggtttggcggaaaaacaccgcggggttgtcgggggaggcgaagtgcatgacccccacgcgcgataacccgaacgcgctatccggacacgggtaaaacccggccggatgccccagggctagggcggagcgcacggactcgtcccacacggcaacctgaggggccagtcgatccaacgggaatgccgcccggagctccgggcccggcacgcgtccctccagaacctccaccttgggcggggaacgggccccgccgccgtcctccggcccgacggcttccgggtagtcgtcctcctcgtactgcagctcctctaggaacagcggcgacggcgccacccgcgaaccgccgacccgccccaaaatagcccgcgcgtcgacgggacccaggtatcccccctgccgggcctgcggaggaccgcggggaacctcatcatcatcgtccaggcgaccgcgcaccgactggctacgggccgcatcgggcccggggcgctgccgggacgctcggcgatgggatgtgggcggggcttccgacgcgcgccgtcgtcgggctcgcgggccttcccgtcgacggcgcacgggcggctcgtcgcccgccatctcctccagagcctctagctcgctgtcgtcatccccgcggaacaccgcacgcaggtaccccatgaaccccaccccatcgcccgctggctcgtccgccacgggcgaggcgcgggggcgggtggatgcgcgcctcctgcgccccgcgggttcgcgagccgacatggtggcgatagacgcgggttatcggatgtccgctaccccccaaaaaagaaaaagaccccacagcgcggatggaggccggggtaggtgccgccggaccccctcgcgatgggaatggacgggagcgacggggccggcgcaaaaaaacgcagtatctcccgcgaaggctacccgccgccccagcccccggccaaatgcggaaacggtcccgcgctctcgcctttatacgcgggccgccctgcgacacaatcacccgtccgtggtttcgaatctacacgacaggcccgcagacgcggctaacacacacgccggcaacccagaccccagtgggttggttgcgcggtcccgtctcctggctagttctttcccccaccaccaaataatcagacgacaaccgcaggttttgtaatgtatgtgctcgtgtttattgtggatacgaaccggtgacgggaggggaaaacccagacgggggatgcgggtccggtcgcgccccctacccaccgtactcgtcaattccaagggcatcggtaaacatctgctcaaactcgaagtcggccatatccagagcgccgtagggggcggagtcgtggggggtaaatcccggccccggggaatccccgtcccccaacatgtccagatcgaaatcgtctagcgcgtcggcatgcgccatcgccacgtcctcgccgtctaagtggagctcgtcccccaggctgacatcggtcgggggggccgtcgacagtctgcgcgtgtgtcccgcggggagaaaggacaggcgcggagccgccagccccgcctcttcgggggcgtcgtcgtccgggagatcgagcaggccctcgatggtagacccgtaattgtttttcgtacgcgcgcggctgtacgcgtgttcccgcatgaccgcctcggagggcgaggtcgtgaagctggaatacgagtccaacttcgcccgaatcaacaccataaagtacccagaggcgcgggcctggttgccatgcagggtgggaggggtcgtcaacggcgcccctggctcctccgtagccgcgctgcgcaccagcgggaggttaaggtgctcgcgaatgtggtttagctcccgcagccggcgggcctcgattggcactccccggacggtgagcgctccgttgacgaacatgaagggctggaacagacccgccaactgacgccagctctccaggtcgcaacagaggcagtcaaacaggtcgggccgcatcatctgctcggcgtacgcggcccataggatctcgcgggtcaaaaatagatacaaatgcaaaaacaaaacacgcgccagacgagcggtctctcggtagtacctgtccgcgatcgtggcgcgcagcatttctcccaggtcgcgatcgcgtccgcgcatgtgcgcctggcggtgcagctgccggacgctggcgcgcaggtaccggtacagggccgagcagaagttggccaacacggttcgatagctctcctcccgcgcccgtagctcggcgtggaagaaacgagagagcgcttcgtagtagagcccgaggccgtcgcgggtggccggaagcgtagggaaggccacgtcgccgtgggcgcgaatgtcgatttgggtgcgttcggggacgtacgcgtccccccattccaccacatcgctgggcagcgttgataggaatttacactcccggtacaggtcggcgttggtcggtagcgccgaaaacagatcctcgttccaggtatcgagcatggtacatagcgcggggcccgcgctaaagcccaagtcgtcgaggagacggttaaagagggcggcgggggggacgggcatgggtggggagggcatgagctgggcctggctcaggcgccccgttgcgtacagcgggggggccgccggggtgtttttgggacccccggccgggcgggggggcggtggcgaagcgccgtccgcgttcatgtcggcaaacagctcgtcgaccaagaggtccattgggtggggttgatacgggaaagacgatatcgggcttttgatgcgatcgtccccgcccgcccagagagtgtgggacgcccgacggcgcgggaagagaaaacccccaaacgcgttagaggaccggacggaccttatggggggaagtgggcagcgggaaccccgtccgttcccgaggaatgacagcccgtggtcgccaccacgcatttaagcaacccgcacgggccgccccgtacctcgtgacttccccccacattggctcctgtcacgtgaaggcgaaccgagggcggctgtccaacccaccccccgccacccagtcccggtccccgtcggattgggaaacaaaggcacgcaacgccaacaccgaatgaacccctgttggtgctttattgtctgggtacggaagttttcactcgacgggccgtctggggcgagaagcggagcgggctggggctcgaggtcgctcggtggggcgcgacgccgcagaacgccctcgagtcgccgtggccgcgtcgacgtcctgcaccacgtctggattcaccaactcgttggcgcgctgaagcaggtttttgccctcgcagaccgtcacgcggatggtggtgatgccaaggagttcgttgaggtcttcgtctgtgcgcggacgcgacatgtcccagagctggaccgccgccatccgggcatgcatggccgccaggcgcccgaccgcggcgcagaagacgcgcttgttaaagccggccacccggggggtccatggcgcgtcggggtttgggggggcggtgctaaagtgcagctttctggccagcccctgcgcgggtgtcttggatcgggttggcgccgtcgacgcgggggcgtctgggagtgcggcggattctggctgggccgatttcctgccgcgggtggtctccgccgccggggccgcgggggccttagtcgccacccgctgggttcggggggcccggggggcggtggtgggtgtgcgtccggcccctccggacccagcgggtggcggaggcgcccgcgcaggccccgggccggacaaaaccgccccggaaacgggacgccgcgtccgggggacctccgggtgttcgtcgtcttcggatgacgagcccccgtagagggcataatccgactcgtcgtactggacgaaacggacctcgcccctctggcgcgagcgtgtctgtagggcgccacggcgggaggtgtcaggcggactatcgggactcgccatacctgaagacggggtgtagtacagatcctcgtactcatcgcgcggaacctcccgcggacccgacttcacggagcggcgagaggtcatggttccacgaacacgctagggtcggatgcgcggacaattaggcctgggttcggacggcgggggtggtgcaggtgtggagaggtcgagcgataggggcggcccgggagagaagagagggtccgcaaaacccactggggatgcgtgagtggccctctgtgggcggtgggggagagtcttataggaagtgcatataaccacaacccatgggtctaaccaatccccaggggccaagaaacagacacgccccaaacggtctcggtttccgcgaggaaggggaagtcctgggacaccctccacccccacccctcaccccacacagggcgggttcaggcgtgcccggcagccagtagcctctggcagatctgacagacgtgtgcgataatacacacgcccatcgaggccatgcctacataaaagggcaccagggcccccggggcagacatttggccagtgttttgggtctcgcaccgcgcgcccccgatcccatcgcgcccgccctcctcgccgggcggctccccgcgcgggcccgcgtctcccgccgctaaggcgacgagcaagacaaacaacaggcccgcccgacagacccttctgggggggcccatcgtccctaacaggaagatgagtcagtggggatccggggcgatccttgtccagccggacagcttgggtcgggggtacgatggcgactggcacacggccgtcgctactcgcgggggcggagtcgtgcaactgaacctggtcaacaggcgcgcggtggcttttatgccgaaggttagcggggactccggatgggccgtcgggcgcgtctctctggacctgcgaatggctatgccggctgacttttgcgcgattattcacgcccccgcgctagccagccccgggcaccacgtaatactgggtcttatcgactcggggtaccgcggaaccgttatggccgtggtcgtagcgcctaaaaggacgcgggaatttgcccccgggaccctgcgggtcgacgtgacgttcctggacatcctggcgacccccccggccctcaccgagccgatttccctgcggcagttcccgcaactggcgcccccccctccaaccggggccgggatacgcgaagatccttggttggagggggcgctcggggccccaagcgtgactacggccctaccggcgcgacgccgagggcggtccctcgtctatgccggcgagctgacgccggttcagacggaacacggggacggcgtacgagaagccatcgccttccttccaaaacgcgaggaggatgccggtttcgacattgtcgtccgtcgcccggtcaccgtcccggcaaacggcaccacggtcgtgcagccatccctccgcatgctccacgcggacgccgggcccgcggcctgctatgtgttggggcggtcgtcgctcaacgcccgcggcctcctggtcgttcctacgcgctggctccccgggcacgtatgtgcgtttgttgtttacaaccttacgggggttcctgtgaccctcgaggccggcgccaaggtcgcccagctcctggttgcgggggcggacgctcttccttggatccccccggacaactttcacgggaccaaagcgcttcgaaactaccccaggggtgttccggactcaaccgccgaacccaggaacccgccgctcctggtgtttacgaacgagtttgacgcggaggcccccccgagcgagcgcgggaccgggggttttggttctaccggtatttagcccacagctttgggttcgttccgggcaataaaaaacgtttgtatcgcatctttcctgtgtgtagttgtttatgttggatgcctgtgggtctatcacacccgcccctccatcccacaaacacaaaacacacgggttggatgaaaacacgcatttattgacccaaaacacacggagctgctcgagatgggccagggcgaggtgcggttggggaggctgtaggtctgggaacggacacgcggggacacgattccggtttggggtccgggagggcgtcgccgtttcgggcggcaggcgccagcgtaacctccgggggcggcgtgtgggggtgccccaaggagggcgcctcggtcaccccaatcccccccgaccgggttcccccggcaaccccgaaggcggagaggccaagggcccgttcggcgatggccacatcctccatgaccacgtcactctcggccatgctccgaatagcctgggagacgagcacatccgcggacttgtcagccgcccccacggacatgtacatctgcaggatggtggccatacacgtgtccgccaggcgccgcatcttgtcctgatgggccgccacggccccgtcgatcgtgggggcctcgaacccggggtggtggcgcgccagtcgttctaggttcaccatgcaggcgtggtacgtgcgggccaaggcgcgggccttcacgaggcgtcgggtgtcgtccagggaccccagggcgtcatcgagcgtgatgggggcgggaagtagcgcgttaacgaccgccagggcctcctgcagccgcggctccgcctccgagggcggaacggccgcgcggatcatctcatattgttcctcggggcgcgctccccagccacatatagccccgagaagagaagccatcgcgggcgggtactggcccttgggcgcgcggacgcaatggggcaggaagacgggaaccgcggggagaggcgggcggccgggactcccgtggaggtgaccgcgctttatgcgaccgacgggtgcgttattacctcttcgatcgccctcctcacaaactctctactgggggccgagccggtttatatattcagctacgacgcatacacgcacgatggccgtgccgacgggcccacggagcaagacaggttcgaagagagtcgggcgctctaccaagcgtcgggcgggctaaatggcgactccttccgagtaaccttttgtttattggggacggaagtgggtgggacccaccaggcccgcgggcgaacccgacccatgttcgtctgtcgcttcgagcgagcggacgacgtcgccgcgctacaggacgccctggcgcacgggaccccgctacaaccggaccacatcgccgccaccctggacgcggaggccacgttcgcgctgcatgcgaacatgatcctggctctcaccgtggccatcaacaacgccagcccccgcaccggacgcgacgccgccgcggcgcagtatgatcagggcgcgtccctacgctcgctcgtggggcgcacgtccctgggacaacgcggccttaccacgctatacgtccaccacgaggtgcgcgtgcttgccgcgtaccgcagggcgtattatggaagcgcgcagagtcccttctggtttcttagcaaattcgggccggacgaaaaaagcctggtgctcaccactcggtactacctgcttcaggcccagcgtctggggggcgcgggggccacgtacgacctgcaggccatcaaggacatctgcgccacctacgcgattccccacgccccccgccccgacaccgtcagcgctgcgtccctgacctcgtttgccgccatcacgcggttctgttgcacgagccagtacgcccgcggggccgcggcggccgggtttccgctttacgtggagcgccgtattgcggccgacgtccgcgagaccagtgcgctggagaagttcataacccacgatcgcagttgcctgcgcgtgtccgaccgtgaattcattacgtacatctacctggcccattttgagtgtttcagccccccgcgcctagccacgcatcttcgggccgtgacgacccacgaccccaaccccgcggccagcacggagcagccctcgcccctgggcagggaggccgtggaacaatttttttgtcacgtgcgcgcccaactgaatatcggggagtacgtcaaacacaacgtgaccccccgggagaccgtcctggatggcgatacggccaaggcctacctgcgcgctcgcacgtacgcgcccggggccctgacgcccgcccccgcgtattgcggggccgtggactccgccaccaaaatgatggggcgtttggcggacgccgaaaagctcctggtcccccgcgggtggcccgcgtttgcgcccgccagtcccggggaggacacggcgggcggcacgccgcccccacagacctgcggaattgtcaagcgcctcctgagactggccgccacggaacagcagggccccacacccccggcgatcgcggcgcttatccgtaatgcggcggtgcagactcccctgcccgtctaccggatatccatggtccccacgggacaggcatttgccgcgctggcctgggacgactgggcccgcataacgcgggacgctcgcctggccgaagcggtcgtgtccgccgaagcggcggcgcaccccgaccacggcgcgctgggcaggcggctcacggatcgcatccgcgcccagggccccgtgatgccccctggcggcctggatgccggggggcagatgtacgtgaatcgcaacgagatattcaacggcgcgctggcaatcacaaacatcatcctggatctcgacatcgccctgaaggagcccgtcccctttcgccggctccacgaggccctgggccactttaggcgcggggctctggctgcggttcagctcctgtttcccgcggcccgcgtggaccccgacgcatatccctgttattttttcaaaagcgcatgtcggcccggcccggcgtccgtgggttccggcagcggactcggcaacgacgacgacggggactggtttccctgctacgacgacgccggtgatgaggagtgggcggaggacccgggcgccatggacacatcccacgatcccccggacgacgaggttgcctactttgacctgtgccacgaagtcggccccacggcggaacctcgcgaaacggattcgcccgtgtgttcctgcaccgacaagatcggactgcgggtgtgcatgcccgtccccgccccgtacgtcgtccacggttctctaacgatgcggggggtggcacgggtcatccagcaggcggtgctgttggaccgagattttgtggaggccatcgggagctacgtaaaaaacttcctgttgatcgatacgggggtgtacgcccacggccacagcctgcgcttgccgtattttgccaaaatcgcccccgacgggcctgcgtgcggaaggctgctgccagtgtttgtgatcccccccgcctgcaaagacgttccggcgtttgtcgccgcgcacgccgacccgcggcgcttccattttcacgccccgcccacctatctcgcttccccccgggagatccgtgtcctgcacagcctgggtggggactatgtgagcttctttgaaaggaaggcgtcccgcaacgcgctggaacactttgggcgacgcgagaccctgacggaggtcctgggtcggtacaacgtacagccggatgcgggggggaccgtcgaggggttcgcatcggaactgctggggcggatagtcgcgtgcatcgaaacccactttcccgaacacgccggcgaatatcaggccgtatccgtccggcgggccgtcagtaaggacgactgggtcctcctacagctagtccccgttcgcggtaccctgcagcaaagcctgtcgtgtctgcgctttaagcacggccgggcgagtcgcgccacggcgcggacattcgtcgcgctgagcgtcggggccaacaaccgcctgtgcgtgtccttgtgtcagcagtgctttgccgccaaatgcgacagcaaccgcctgcacacgctgtttaccattgacgccggcacgccatgctcgccgtccgttccctgcagcacctctcaaccgtcgtcttgataacggcgtacggcctcgtgctcgtgtggtacaccgtcttcggtgccagtccgctgcaccgatgtatttacgcggtacgccccaccggcaccaacaacgacaccgccctcgtgtggatgaaaatgaaccagaccctattgtttctgggggccccgacgcacccccccaacgggggctggcgcaaccacgcccatatctgctacgccaatcttatcgcgggtagggtcgtgcccttccaggtcccacctgacgccatgaatcgtcggatcatgaacgtccacgaggcagttaactgtctggagaccctatggtacacacgggtgcgtctggtggtcgtagggtggttcctgtatctggcgttcgtcgccctccaccaacgccgatgtatgtttggcgtcgtgagtcccgcccacaagatggtggccccggccacctacctcttgaactacgcaggccgcatcgtatcgagcgtgttcctgcagtacccctacacgaaaattacccgcctgctctgcgagctgtcggtccagcggcaaaacctggttcagttgtttgagacggacccggtcaccttcttgtaccaccgccccgccatcggggtcatcgtaggctgcgagttgatgctacgctttgtggccgtgggtctcatcgtcggcaccgctttcatatcccggggggcatgtgcgatcacataccccctgtttctgaccatcaccacctggtgttttgtctccaccatcggcctgacagagctgtattgtattctgcggcggggcccggcccccaagaacgcagacaaggccgccgccccggggcgatccaaggggctgtcgggcgtctgcgggcgctgctgttccatcatcctctcgggcatcgcagtgcgattgtgttatatcgccgtggtggccggggtggtgctcgtggcgcttcactacgagcaggagatccagaggcgcctgtttgatgtatgacgtcacatccaggccggcggaaaccgtaacggcatatgcaaattggaaactgtcctgtcttggggcccacccacccgacgcgtcatatgcaaatgaaaatcggtcccccgaggccacgtgtagcctggatcccaacgaccccgcccatgggtcccaattggccgtcccgttaccaagaccaacccagccagcgtatccacccccgcccgggtccccgcggaagcggaacggggtatgtgatatgctaattaaatacatgccacgtacttatggtgtctgattggtccttgtctgtgccggaggtggggcgggggccccgcccggggggcggaacgaggaggggtttgggagagccggccccggcaccacgggtataaggacatccaccacccggccggtggtggtgtgcagccgtgttccaaccacggtcacgcttcggtgcctctccccgattcgggcccggtcgctcgctaccggtgcgccaccaccagaggccatatccgacaccccagccccgacggcagccgacagcccggtcatggcgactgacattgatatgctaattgacctcggcctggacctctccgacagcgatctggacgaggacccccccgagccggcggagagccgccgcgacgacctggaatcggacagcagcggggagtgttcctcgtcggacgaggacatggaagacccccacggagaggacggaccggagccgatactcgacgccgctcgcccggcggtccgcccgtctcgtccagaagaccccggcgtacccagcacccagacgcctcgtccgacggagcggcagggccccaacgatcctcaaccagcgccccacagtgtgtggtcgcgcctcggggcccggcgaccgtcttgctcccccgagcagcacgggggcaaggtggcccgcctccaacccccaccgaccaaagcccagcctgcccgcggcggacgccgtgggcgtcgcaggggtcggggtcgcggtggtcccggggctgccgatggtttgtcggacccccgccggcgtgcccccagaaccaatcgcaaccctgggggaccccgccccggggcggggtggacggacggccccggcgccccccatggcgaggcgtggcgcggcagtgagcagcccgacccacccggaggccagcggacacggggcgtgcgccaagcaccccccccgctaatgacgctggcgattgcccccccgcccgcggacccccgcgccccggccccggagcgaaaggcgcccgccgccgacaccatcgacgccaccacgcggttggtcctgcgctccatctccgagcgcgcggcggtcgaccgcatcagcgagagctttggccgcagcgcacaggtcatgcacgacccctttggggggcagccgtttcccgccgcgaatagcccctgggccccggtgctggcgggccaaggagggccctttgacgccgagaccagacgggtctcctgggaaaccttggtcgcccacggcccgagcctctatcgcacttttgccggcaatcctcgggccgcatcgaccgccaaggccatgcgcgactgcgtgctgcgccaagaaaatttcatcgaggcgctggcctccgccgacgagacgctggcgtggtgcaagatgtgcatccaccacaacctgccgctgcgcccccaggaccccattatcgggacgaccgcggctgtgctggataacctcgccacgcgcctgcggccctttctccagtgctacctgaaggcgcgaggcctgtgcggcctggacgaactgtgttcgcggcggcgtctggcggacattaaggacattgcatccttcgtgtttgtcattctggccaggctcgccaaccgcgtcgagcgtggcgtcgcggagatcgactacgcgacccttggtgtcggggtcggagagaagatgcatttctacctccccggggcctgcatggcgggcctgatcgaaatcctagacacgcaccgccaggagtgttcgagtcgtgtctgcgagttgacggccagtcacatcgtcgcccccccgtacgtgcacggcaaatatttttattgcaactccctgttttaggtacaataaaaacaaaacatttcaaacaaatcgcccctcgtgttgtccttctttgctcatggccggcggggcgtgggtcacggcagatggcgggggtgggcccggcgtacggcctgggtgggcggagggaactaacccaacgtataaatccgtccccgttccaaggccggtgtcatagtgcccttaggagcttcccgcccgggcgcatccccccttttgcactatgacagcgacccccctcaccaacctgttcttacgggccccggacataacccacgtggcccccccttactgcctcaacgccacctggcaggccgaaacggccatgcacaccagcaaaacggactccgcttgcgtggccgtgcggagttacctggtccgcgcctcctgtgagaccagcggcacaatccactgctttttctttgcggtatacaaggacacccaccacacccctccgctgattaccgagctccgcaactttgcggacctggttaaccacccgccggtcctacgcgaactggaggataagcgcggggtgcggctgcggtgtgcgcggccgtttagcgtcgggacgattaaggacgtctctgggtccggcgcgtcctcggcgggagagtacacgataaacgggatcgtgtaccactgccactgtcggtatccgttctcaaaaacatgctggatgggggcctccgcggccctacagcacctgcgctccatcagctccagcggcatggccgcccgcgcggcagagcatcgacgcgtcaagattaaaattaaggcgtgatctccaacccccccatgaatgtgtgtaaccccccccaaaaaaataaagagccgtaacccaaccaaaccaggcgtggtgtgagtttgtggacccaaagccctcagagacaacgcgacaggccagtatggaccgtgatacttttatttattaactcacaggggcgcttaccgccacaggaataccagaataatgaccaccacaatcgcgaccaccccaaatacagcatggcgccacaccacgccacaacagccctgtcgccggtatggggcatgatcagacgagccgcgcgccgcgcgttgggccctgtacagctcgcgcgaattgaccctaggaggccgccacgcgcccgagttttgcgttcgtcgctggtcgtcgggcgccaaagccccggacggctgttcggtcgaacgaacggccacgacagtggcataggttggggggtggtccgacatagcctcggcgtacgtcgggaggcccgacaagaggtcccttgtgatgtcgggtggggccacaagcctggtttccggaagaaacaggggggttgccaataacccgccagggccaaaactccggcgctgcgcacgtcgttcggcgcggcgccgggcgcgccgagcggctcgctgggcggcttggcgtgagcggccccgctccgacgcctcgccctctccggaggaggttggcggaattggcacggacaacaggggcccagcagagtacggtggaggtgggtccgtgggggtgtccagatcaataacgacaaacggcccctcgttcctaccagacaagctatcgtaggggggcgggggatcagcaaacgcgttccccgcgctccataaacccgcgtcgggttgcgccgcctccgaagccatggatgcgccccaaagccacgactcccgcgcgctaggtccttggggtaatggaaaaggccctactccccatccaagccagccaagttaacgggctacgccttcgggaatgggactggcaccccggcggattttgttgggctggcatgcgtcgcccaaccgagggccgcgtccacgggacgcgccttttataaccccgggggtcattcccaacgatcacatgcaatctaactggctcccctctccccccctctcccctctccccccctctcccctctccccccctctcccctctccccccctctcccctctccccccctctcccctctccccccctctcccctctccccccctctcccctctccccccctctcccctctccccccctctcccctctccccccctctcccctctcccctctgctctttccccgtgacacccgacgctgggggcgtggctgccgggaggggccgcggatgggcgggcctacttggtttcccgccccccccccccccccccgaaccgccccgccggctttgcccccctttgatcccctgctacccccaacccgtgctggtggtgcgggttggggggggatgtgggcgggggtgcgcgggaggtgtcggtggtggtggtggtggtggtagtaggaatggtggtgagggggggggggcgctggttggtcaaaaaagggagggacgggggccggcagaccgacggcgacaacgctccccggcggccgggtcgcggctcttacgagcggcccggcccgcgctcccaccccccgggccgtgtccttgctttccccccgtctcccccccccccgccttctcctcctcctcctcgtttttccaaaccccgcccacccggcccggcccggcccggcccggcccggccaccgccgcccacccacccacctcgggatacccagccccggtcccccgttccccgggggccgttatctccagcgccccgtccggcgcgccgccccccgccgctaaaccccatcccgcccccgggaccccacatataagcccccagccacacgcaagaacagacacgcagaacggctgtgtttatttaaataaaccaatgtcggaataaacaaacacaaacacccgcgacggggggacggaggggacggagggagggggtgacgggggacgggaacagacacaaaaacaaccacaaaaaacaaccacccaccgacacccccaccccagtctcctcgccttctcccacccaccccacgcccccactgagcccggtcgatcgacgagcacccccgcccacgcccccgcccctgccccggcgacccccggcccgcacgatcccgacaacaataacaaccccaacggaaagcggcggggtgttgggggaggcgaggaacaaccgaggggaacgggggatggaaggacgggaagtggaagtcctgatacccatcctacacccccctgccttccaccctccggccccccgcgagtccacccgccggccggctaccgagaccgaacacggcggccgccgcagccgccgcagccgccgccgacaccgcagagccggcgcgcgcactcacaagcggcagaggcagaaaggcccagagtcattgtttatgtggccgcgggccagcagacggcccgcgacaccccccccccgcccgtgtgggtatccggccccccgccccgcgccggtccattaagggcgcgcgtgcccgcgagatatcaatccgttaagtgctctgcagacaggggcaccgcgcccggaaatccattaggccgcagacgaggaaaataaaattacatcacctacccacgtggtgctgtggcctgtttttgctgcgtcatctcagcctttataaaagcgggggcgcggccgtgccgatcgcgggtggtgcgaaagactttccgggcgcgtccgggtgccgcggctctccgggcccccctgcagccggggcggccaaggggcgtcggcgacatcctccccctaagcgccggccggccgctggtctgttttttcgttttccccgtttcgggggtggtgggggttgcggtttctgtttctttaacccgtctggggtgtttttcgttccgtcgccggaatgtttcgttcgtctgtcccctcacggggcgaaggccgcgtacggcccgggacgaggggcccccgaccgcggcggtccgggccccgtccggacccgctcgccggcacgcgacgcgaaaaaggccccccggaggcttttccgggttcccggcccggggcctgagatgaacactcggggttaccgccaacggccggcccccgtggcggcccggcccggggccccggcggacccaaggggccccggcccggggccccacaacggcccggcgcatgcgctgtggtttttttttcctcggtgttctgccgggctccatcgcctttcctgttctcgcttctccccccccccttcttcacccccagtaccctcctccctcccttcctcccccgttatcccactcgtcgagggcgccccggtgtcgttcaacaaagacgccgcgtttccaggtaggttagacacctgcttctccccaatagaggggggggacccaaacgacagggggcgccccagaggctaaggtcggccacgccactcgcgggtgggctcgtgttacagcacaccagcccgttcttttccccccctcccacccttagtcagactctgttacttacccgtccgaccaccaactgcccccttatctaagggccggctggaagaccgccagggggtcggccggtgtcgctgtaaccccccacgccaatgacccacgtactccaagaaggcatgtgtcccaccccgcctgtgtttttgtgcctggctctctatgcttgggtcttactgcctggggggggggagtgcgggggagggggggtgtggaaggaaatgcacggcgcgtgtgtaccccccctaaagttgttcctaaagcgaggatacggaggagtggcgggtgccgggggaccggggtgatctctggcacgcgggggtgggaagggtcgggggagggggggatggagtaccggcccacctggccgcgcgggtgcgcgtgcctttgcacaccaaccccacgtcccccggcggtctctaagaagcaccgccccccctccttcataccaccgagcatgcctgggtgtgggttggtaaccaacacgcccatcccctcgtctcctgtgattctctggctgcaccgcattcttgttttctaactatgttcctgtttctgtctcccccccccccacccctccgccccaccccccaacacccacgtctgtggtgtggccgacccccttttgggcgccccgtcccgccccgccacccctcccatcctttgttgccctatagtgtagttaaccccccccgccctttgtggcggccagaggccaggtcagtccgggcgggcaggcgctcgcggaaacttaacacccacacccaacccactgtggttctggctccatgccagtggcaggatgctttcggggatcggtggtcaggcagcccgggccgcggctctgtggttaacaccagagcctgcccaacatggcacccccactcccacgcacccccactcccacgcacccccactcccacgcacccccactcccacgcacccccactcccacgcacccccactcccacgcacccccactcccacgcacccccactcccacgcacccccactcccacgcatccccgcgatacatccaacacagacagggaaaagatacaaaagtaaacctttatttcccaacagacagcaaaaatcccctgagtttttttttattagggccaacacaaaagacccgctggtgtgtggtgcccgtgtctttcacttttcccctccccgacacggattggctggtgtagtgggcgcggccagagaccacccagcgcccgacccccccctccccacaaacacggggggcgtcccttattgttttccctcgtcccgggtcgacgccccctgctccccggaccacgggtgccgagaccgcaggctgcggaagtccagggcgcccactagggtgccctggtcgaacagcatgttccccacgggggtcatccagaggctgttccactccgacgcgggggccgtcgggtactcggggggcatcacgtggttacccgcggtctcggggagcagggtgcggcggctccagccggggaccgcggcccgcagccgggtcgccatgtttcccgtctggtccaccaggaccacgtacgccccgatgttccccgtctccatgtccaggatgggcaggcagtcccccgtgatagtcttgttcacgtaaggcgacagggcgaccacgctagagacccccgagatgggcaggtagcgcgtgaggccgcccgcggggacggccccggaagtctccgcgtggcgcgtcttccgggcacacttcctcggcccccgcggcccagaagcagcgcgggggccgagggaggtttcctcttgtctccctcccagggcaccgacggccccgcccgaggaggcggaagcggaggaggacgcggccccggcggcggaagaggcggcccccgcgggggtcggggccgaggaggaagaggcagaggaggaagaggcggaggccgccgaggacgtcaggggggtcccgggcccaccctggccgcgcccccccggccctgagtcggagggggggtgcgtcgccgccctcttggcccctgccggcgcgagggggggacgcgtggactggggggaggggttttcctggcccgacccgcgcctcttcctcggacgcaccgccgcctcctgctcgacagaggcggcggaggggagcggggcggcgccggagggggcggcgccgcgggagggcccgtgcccaccctccacgcccggcccccccgagccgcgcgccaccgtcgcacgcgcccggcacagactctgttcttggttcgcggcctgagccagggacgagtgcgactggggcacacggcgcgcgtccgcggggcgggcggccggctccgccccgggggccggggcgcgggggccgggccccggaggcggcgctcgcacgcacggggccacggccgcgcgggggcgcgcgggtcccgacgcggccgcggacgcggggggcccggggcggggggcggagcctggcatgggcgccgcggggggcctgtggggagaggccgggggggagtcgctgatcactatggggtctctgttgtttgcaaggggggcgggtctgttgacaagggggcccgtccggcccctcggccgccccgcctccgcttcaacaaccccaaccccaaccccaacccccccggaggggccagacgccccccgcggcgccgcggctcgcgactggcgggagccgccgccgccgctgctgttggtggtggtgttggtgttactgctgccgtgtggcccgatgggcgccgaggggggcgctgtccgagccgcggccggctggggggctgcgtgagacgccccgcccgtcacggggggcgcggcggcgcctctgcgtgggggggcgcggggcgtccggcggggggcgggcggtacgtagtctgctgcaagagacaacggggggcgcgatcaggttacgccccctccccggcccgccctttcctcgcccgcccgcctattcctccctccccccccctcctcctcctcctcccccagggtccttgccgccccccgcctcaccgtcgtccaggtcgtcgtcatcctcgtccgtggtgggctccgggtgggtgggcgacagggccctcaccgtgtgcccccccagggtcaggtaccgcggggcgaaccgctgattgcccgtccagataaagtccacggccgtgcccgccctgacggcctcctcggcctccatgcgggtctgggggtcgttcacgatcgggatggtgctgaacgacccgctgggcgtcacgcccactatcaggtacaccagcttggcgttgcacagcgggcaggtgttgcgcaattgcatccaggttttcatgcacgggatgcagaagcggtgcatgcacgggaaggtgtcgcagcgcaggtggggcgcgatctcatccgtgcacacggcgcacacgtcgccctcgtcgctccccccgtcctctcgagggggggcgcccccgcaactgccggggtcttcctcgcggggggggctcccccccgagaccgcccccccatccacgccctgcggccccagcagccccgtctcgaacagttccgtgtccgtgctgtccgcctcggaggcggagtcgtcgtcatggtggtcggcgtccccccgcccccccacttcggtctccgcctcagagtcgctgctgtccggcaggtctcggtcgcagggaaacacccagacatccggggcgggctaaggggaaaaaaggggggcgggtaagaatggggggggatttcccgcgtcaatcagcacccacgagttccccctctcccccccccgcctcacaaagtcctgcccccctgctggcctcggaagaggggggagaaaggggtctgcaaccaaaggtggtctgggtccgtcctttggatcccgacccctcttcttccctcttctcccgccctccagacgcaccggagtcgggggtcccacggcgtcccccaaatatggcgggcggctcctccccacccccctagatgcgtgtgagtaaggggggcctgcgtatgagtcagtggggaccacgcccccaacacggcgaccccggtccttgtgtgtttgttgtgggggcgtgtctctgtgtatgagtcagggggtcccacggcgaccccgggccctgcgtctgagtcaaaggggccatgtgtatgtgttgggggtctgtatatataaagtcagggggtcacatggcgacccccaacagggcgaccccggtccctgtatatatagggtcagggggttccgcaccccctaacatggcgcccccggtccctgtatatatagtgtcacggggttccacgccccctaacatggcgccccaacatggcgcccggctcccgtgtatgagtgggggtcccccaacatggcggccggttccagtgtaagggtcgggggtcccccaacatggcgccccccaatatggcgccccccaatatggcgccccagacatggcgcccggcccctcacctcgcgctgggggcggccctcaggccggcgggtactcgctccggggcggggctccatgggggtcgtatgcggctggagggtcgcggacggagggtccctgggggtcgcaacgtaggcggggcttctgtggtgatgcggagagggggcggcccgagtctgcctggctgctgcgtctcgctccgagtgccgaggtgcaaatgcgaccagactgtcgggccagggctaacttataccccacgcctttcccctccccaaaggggcggcagtgacgattcccccaatggccgcgcgtcccaggggaggcaggcccaccgcggggcggccccgtccccggggaccaacccggcgcccccaaagaatatcattagcatgcacggcccggcccccgatttgggggcccaacccggtgtcccccaaagaaccccattagcatgcccctcccgccgacgcaacaggggcttggcctgcgtcggtgccccggggcttcccgccttcccgaagaaactcattaccatacccggaaccccaggggaccaatgcgggttcattgagcgacccgcgggccaatgcgcgaggggccgtgtgttccgccaaaaaagcaattagcataacccggaaccccaggggagtggttacgcgcggcgcgggaggcggggaataccggggttgcccattaagggccgcgggaattgccggaagcgggaagggcggccggggccgcccattaatgagtttctaattaccataccgggaagcggaacaaggcctcttgcaagtttttaattaccataccgggaagtgggcggcccggcccattgggcggtaactcccgcccaatgggccgggccccgaagactcggcggacgctggttggccgggccccgccgcgctggcggccgccgattggccagtcccgcccccgaggcggcccgccctgtgagggcgggctggctccaagcgtatatatgcgcggctcctgccatcgtctctccggagagcggcttggtgcggagctcccgggagctccgcggaagacccaggccgcctcgggtgtaacgttagaccgagttcgccgggccggctccgcgggccagggcccgggcacgggcctcgggccccaggcacggcccgatgaccgcctcggcctccgccacccggcgccggaaccgagcccggtcggcccgctcgcgggcccacgagccgcggcgcgccaggcgggcggccgaggcccagaccaccaggtggcgcacccggacgtggggcgagaagcgcacccgcgcgggggtcgcgggggtcgcgggggtcgcgggggtcgcgggggtcgcggggggctccggcgccccctccccgcccgcgcgtcgcaggcgcaggcgcgccaggtgctccgcggtgacgcgcaggcggagggcgaggcgcggcggaaggcggaaggggcgcgagggggggtgggaggggtcagccccgccccccgggcccacgccgggcggtgggggccggggccggggggcggcggcggtgggccgggcctctgcgcccgcgcaccaccaccgcccctcgccccctcccgcccctcgccccctcccgcccctcgccccctcccgcccctcgccccctcccgcccctcgccccctcccgcccctcgccccctcccgcccctcgccccctcccgcccctcgccccctcccgcccctcgccccctcccgcccctcgccccctcccgcccctcgccccctcccgcccctcgccccctcccgcccctcgccccctcccgcccctcgccccctcccgcccctcgccccctcccgcccctcgccccctcccgcccctcgccccctcccgcccctcgccccctcccgcccctcgccccctcccgcccctcgaataaacaacgctactgcaaaacttaatcaggttgttgccgtttattgcgtcttcgggtctcacaagcgccccgccccgtcccggcccgttacagcaccccgtccccctcgaacgcgccgccgtcgtcttcgtcccaggcgccttcccagtccacaacttcccgccgcgggggcgtggccaagcccgcctccgcccccagcacctccacggcccccgccgccgccagcacggtgccgctgcggcccgtggccgaggcccagcgaatcccgggcggcgccggcggcagggcccccgggccgtcgtcgtcgccgcgcagcaccagcgggggggcgtcgtcgtcgggctccagcagggcgcgggcgcaaaagtccctccgcggcccgcgccaccgggccgggccggcgcgcaccgcctcgcgccccagcgccacgtacacgggccgcagcggcgcgcccaggccccagcgcgcgcaggcggcgtgcgagtgggcctcctcctcgcagaagtccggcgcgccgggcgccatggcgtcggtggtccccgaggccgccgcccggccgtccagcgccggcagcacggcccggcggtactcgcgcggggacatgggcaccggcgtgtccgggccgaagcgcgtgcgcacgcggtagcgcacgttgccgccgcggcacaggcgcagcggcggcgcgtcggggtacaggcgcgcgtgcgcggcctccacgcgcgcgaagacccccgggccgaacacgcggcccgaggccagcaccgtgcggcgcaggtcccgcgccgccggccagcgcacggcgcactgcacggcgggcagcagctcgcacgccaggtaggcgtgctgccgcgacaccgcgggcccgtcggcgggccagtcgcaggcgcgcacggtgttgaccacgatgagccgccggtcgccggcgctggcgagcagccccagaaactccacggccccggcgaaggccaggtcccgcgtggacagcagcagcacgccctgtgcgcccagcgccgacacgtcgggggcgccggtccaattgcccgcccaggcggccgtgtccggcccgcacagccggttggccagggccgccagcaggcaggacagcccgccgcgctcggcggaccactccggcggcccccccgaggccccgccgccggccaggtcctcgcccggcagcggcgagtacagcaccaccacgcgcacgtcctcggggtcggggatctggcgcatccaggccgccatgcggcgcagcgggcccgaggcgcgcagggggccaaagaggcggcccccggcggccccgtgggggtgggggttatcgtcgtcgtcgccgccgccgcacgcggcctgggcggcgggggcgggcccggcgcaccgcgcggcgatcgaggccagggcccgcgggtcaaacatgagggccggtcgccaggggacggggaacagcgggtggtccgtgagctcggccacggcgcgcggggagcagtaggcctccagggcggcggccgcgggcgccgccgtgtggctgggccccgggggctgccgccgccagccgcccagggggtcggggccctcggcgggccggcgcgacacggccacggggcgcgggcgggcctgcgccgcggcggcccggggcgccgcgggctgggcgggggcgggctcgggccccgggggcgtggaggggggcgcgggcgcggggaggggggcgcgggcgtccgagccgggggcgtccgcgccgctcttcttcgtcttcgggggtcgcgggccgccgcctccgggcggccgggccgggccgggactcttgcgcttgcgcccctcccgcggcgcggcggaggcggcggcggccgccagcgcgtcggcggcgtccggtgcgctggccgccgccgccagcagggggcgcaggctctggttgtcaaacagcaggtccgcggcggcggcggccgcggagctcggcaggcgcgggtcccgcggcagcgcggggcccagggccccggcgaccaggctcacggcgcgcacggcggccacggcggcctcgctgccgccggccacgcgcaggtccccgcgcaggcgcatgagcaccagcgcgtcgcgcacgaaccgcagctcgcgcagccacgcgcgcaggcggggcgcgtcggcgtgcggcggcggcggggaagcggggcccgcgggtccctccggccgcggggggctggcgggccgggccccggccagccccgggacggccgccaggtcgccgtcgaagccctcggccagcgcctccaggatcccgcggcaggcggccaggcactcgacggccacgcggccggcctgggcgcggcgcccggcgtcgtcgtcggcgtcggcgtggcgggcggcgtcggggtcgtcgccccccgcgggggaggcgggcgcggcggacagccgccccagggcggcgaggatccccgcggcgccgtacccggcgggcaccgcgcgctcgcccggtgcggcggcggcgacggcggcgaccccctcgtcatctgcgccggcgccggggctccccgcggcccccgtcagcgccgcgttctcgcgcgccaacaggggcgcgtaggcgcggcgcaggctggtcagcaggaagcccttctgcgcgcggtcgtatcggcggctcatggccacggcggccgccgcgtgcgccaggccccagccgaagcggccggccgccatggcgtagcccaggtggggcacggcccgcgccacgctgccggtgatgaaggagctgctgttgcgcgcggcgcccgagatccggaagcaggcctggtccagcgccacgtccccggggaccacgcgcgggttctggagccaccccatggcctccgcgtccggggtgtacagcagccgcgtgatcagggcgtactgctgcgcggcgtcgcccagctcgggcgcccacacggccgccggggcgcccgaggcctcgaaccggcgtcgcgcctcctccgcctcgggcgccccccagaggcccgggcggctgtcgcccaggccgccgtacagcacccgccccgggggcgggggcccggcgccgggccacggctccccgctgacgtacccgtcgcgatagcgcgcgtagaaggcgccggaggtcgcgtcggcgtccagctcgacccgccggggctgcccggccgtgaagcggcccgtggcgtcgcggccggccaccgccgcgcgggcccggcggcgctcgatgcggcccgcggaggccgcgggggtcctcgccgccgcccggggcttgggcgcggcctcggagagggggggtggcccgggcgggggcggcgtccgcccgggggctgccggcgccgcgctcgacggaccccgcccgacggcccgcgcctcgcgtgcgtggtcggccgcgtcgttgccgtcgtcgtcctcgtcctcgtcggacgacgaggacgaagaggatgcggacgacgaggacgaggacccggagtccgacgaggtcgatgacgccgatggccgccaccggccgtgacgacgtctccgcggcggctgggccggcgggcgcggcgacaggcggtccgtggggtccggatacgcgccgcgtagcggggcctcccgttcgcggccccgggccggggcccggtcgccggcggcgtcggctgcgtcgtcgtactcgtccccgtcatcgtcgtcggctcgaaaggcgggggtccggggcggcgaggccgcggggtcgggcgtcgggatcgtccggacggcctcctctaccatggaggccagcagagccagctgtcgcggcgagacggcgtccccggcgtcctcgccggcgtcggtgcccgccgcgggggccctcccgtcccgccgggcgtcgtcgaggtcgtgggggtggtcggggtcgtggtcggggtcgtccccgccctcctccgtctccgcgccccacccgagggccccccgctcgtcgcggtctgggctcggggtgggcggcggcccgtcggtggggcccggggagccggggcgctgcttgttctccgacgccatcgccgatgcggggcgatcctccggggatacggctgcgacggcggacgtagcacggtaggtcacctacggactctcgatggggggagggggcgagacccacggaccccgacgacccccgccgtcgacgcggaactagcgcggaccggtcgatgcttgggtgggaaaaaggacagggacggccgatccccctcccgcgcttcgtccgcgtatcggcgtcccggcgcggcgagcgtctgacggtctgtctctggcggtcccgcgtcgggtcgtggatccgtgtcggcagccgcgctccgtgtggacgatcggggcgtcctcgggctcatatagtcccaggggccggcgggaaggaggagcagcggaggccgccggccccccgcccccccggcgggcccaccccgaacggaattccattatgcacgaccccgccccgacgccggcacgccgggggcccgtggccgcggcccgttggtcgaacccccggccccgcccatccgcgccatctgccatgggcggggcgcgagggcgggtgggtccgcgccccgccccgcatggcatctcattaccgcccgatccggcggtttccgcttccgttccgcatgctaacgaggaacgggcagggggcggggcccgggccccgacttcccggttcggcggtaatgagatacgagccccgcgcgcccgttggccgtccccgggccccccggtcccgcccgccggacgccgggaccaacgggacggcgggcggcccaagggccgcccgccttgccgcccccccattggccggcgggcgggaccgccccaagggggcggggccgccgggtaaaagaagtgagaacgcgaagcgttcgcacttcgtcccaatatatatatattattagggcgaagtgcgagcactggcgccgtgcccgactccgcgccggccccgggggcgggcccgggcggcggggggcgggtctctccggcgcacataaaggcccggcgcgaccgacgcccgcagacggcgccggccacgaacgacgggagcggctgcggagcacgcggaccgggagcgggagtcgcagagggccgtcggagcggacggcgtcggcatcgcgacgccccggctcgggatcgggatcgcatcggaaagggacacgcggacgcgggggggaaagacccgcccaccccacccacgaaacacaggggacgcaccccgggggcctccgacgacagaaacccaccggtccgccttttttgcacgggtaagcaccttgggtgggcggaggagggggggacgcgggggcggaggaggggggacgcgggggcggaggaggggggacgcgggggcggaggaggggggacgcgggggcggaggaggggggacgcgggggcggaggagggggctcacccgcgttcgtgccttcccgcaggaggaacgtcctcgtcgaggcgaccggcggcgaccgttgcgtggaccgcttcctgctcgtcgggcggggggaagccactgtggtcctccgggacgttttctggatggccgacatttccccaggcgcttttgcgccttgtgtaaaagcgcggcgtcccgctctccgatccccgcccctgggcacgcgcaagcgcaagcgcccttcccgccccctctcatcggagtctgaggtagaatccgatacagccttggagtctgaggtcgaatccgagacagcatcggattcgaccgagtctggggaccaggatgaagccccccgcatcggtggccgtagggccccccggaggcttggggggcggttttttctggacatgtcggcggaatccaccacggggacggaaacggatgcgtcggtgtcggacgaccccgacgacacgtccgactggtcttatgacgacattcccccacgacccaagcgggcccgggtaaacctgcggctcacgagctctcccgatcggcgggatggggttatttttcctaagatggggcgggtccggtctacccgggaaacgcagccccgggcccccaccccgtcggccccaagcccaaatgcaatgctacggcgctcggtgcgccaggcccagaggcggagcagcgcacgatggacccccgacctgggctacatgcgccagtgtatcaatcagctgtttcgggtcctgcgggtcgcccgggacccccacggcagtgccaaccgcctgcgccacctgatacgcgactgttacctgatgggatactgccgagcccgtctggccccgcgcacgtggtgccgtttgctgcaggtgtccggcggaacctggggcatgcacctgcgcaacaccatacgggaggtggaggctcgattcgacgccaccgcggaacccgtgtgcaagcttccttgtttggagaccagacggtacggcccggagtgtgatcttagtaatctcgagattcatctcagcgcgacaagcgatgatgaaatctccgatgccaccgatctggaggccgccggttcggaccacacgctcgcgtcccagtccgacacggaggatgccccctcccccgttacgctggaaaccccagaaccccgcgggtccctcgctgtgcgtctggaggatgagtttggggagtttgactggaccccccaggagggctcccagccctggctgtctgcggtcgtggccgataccagctccgtggaacgcccgggcccatccgattctggggcgggtcgcgccgcagaagaccgcaagtgtctggacggctgccggaaaatgcgcttctccaccgcctgcccctatccgtgcagcgacacgtttctccggccgtgagtccggtcgccccgacccccttgtatgtccccaaaataaaagaccaaaatcaaagcgtttgtcccagcgtcttaatggcgggaagggcggagagaaacagaccacgcggacatggggggtgtttgggggtttattggcaccgggggctaaagggtggtaaccggatagcagatgtgaggaagtcggggccgttcgccgcgaacggcgatcagagggtcagtttcttgcggaccacggcccggcgatgtgggttgctcgtctgggacctcgggcatgcccatacacgcacaacacggacgccgcaccggatgggacgtcgtaagggggcctggggtagctgggtggggtttgtgcagagcaatcagggaccgcagccagcgcatacaatcgcgctcccgtccgtttgtcccgggcagtaccacgccgtactggtattcgtaccggctgagcagggtctccagggggtggttgggggccgcggggaacggggtccacgccacggtccactcgggcaaaaaccgagtcggcacggcccacggttctcccacccacgcgtctggggtcttgatggcgataaatcttaccccgagccggattttttgggcgtattcgagaaacggcacacacagatccgccgcgcctaccacccacaagtggtagaggcgaggggggctgggttggtctcggtgcagcagtcggaagcacgccacggcgtccacgacctcggtgctctccaaggggctgtcctccgcaaacaggcccgtggtggtgtttggggggcagcgacaggacctagtgcgcacgatcgggcgggtgggtttgggtaagtccatcagcggctcggccaaccgtcgaaggttggccggacgaacgacgaccggggtacccaggggttctgatgccaaaatgcggcactgcctaagcaggaagctccacagggccgggcttgcgtcgacggaagtccggggcagggcgttgttctggtcaaggagggtcattacgttgacgacaacaacgcccatgttggtatattacaggcccgtgtccgatttggggcacttgcagatttgtaaggccacgcacggcggggagacaggccgacgcgggggctgctctaaaaatttaagggccctacggtccacagacccgccttcccgggggggcccttggagcgaccggcagcggaggcgtccgggggaggggagggtgatttacgggggggtattattgaagcatttatcagggttattgtctcatgagcggatacatatttgaatgtatttagaaaaataaacaaataggggttccgcgcacatttccccgaaaagtgccacctgacgtctaagaaaccattattatcatgacattaacctataaaaataggcgtatcacgaggccctttcgtcttcaagaattcgcgccggatccttaattaagtctagagtccacgtgacgtgcggagtgcgccgtgctctgttggtttcacctgtggcagcccgggccccccgcgggcgcgcgcgcgcgcaaaaaaggcgggcggcggtccgggcggcgtgcgcgcgcgcggcgggcgtggggggcggggccgcgggagcggggggaggagcggggggaggagcggggggaggagcggggggaggagcggggggaggagcggggggaggagcggggggaggagcggggggaggagcggggggaggagcggggggaggagcggggggaggagcggggggaggagcggggggaggagcggggggaggagcggggggaggagcggggggaggagcggggggaggagcggggggaggagcggccagacgccgaaaacgggccccccccaaaacacaccccccgggggtcgcgcgcggccctttaaagcggtggcggcgggcagcccgggccccccgcggccgagactagcgagttagagactgtttattaacgcttacaatttacgccttaagatacattgatgagtttggacaaaccacaactagaatgcagtgaaaaaaatgctttatttgtgaaatttgtgatgctattgctttatttgtaaccattataagctgcaataaacaagttaacaacaacaattgcattcattttatgtttcaggttcagggggaggtgtgggaggttttttaaagcaagtaaaacctctacaaatgtggtatggctgattatgatctagagtcgcggccgccactgtgctggatatctgcagaattcggcttggtggccctcctatagtgagtcgtattatactatgccgtatactatgccgatgattaattgtcaacactaggcgccttaacatgcacttatcctatcattgatgaattgaactaacttattgatgatgcatggcccgaggatgagcaacagaaggaggagtaataggggcccagcgatggttgatagcagggtagtgaaccaaggggagttattgaaccatccttcataccagttttggcttttctggcgctctaactgtcttttatccagtttttctttgagttttttcatggagtcccgtactgcacctgagtggtctatgtaaaaacagcactcttcctttagggccgcacagaggccaccttcttttagaaacagcaagtcaaggcctctcctattttggagcactacctcggacagggaagtcagtgagtcctctaacttgctgactgagtcttggagggcccggaggtcagcatctatggcgatctggaggcttgtcaggccttgctggaggtctataggtcctttaattaaggcagttgaaccagtacctattcccgccgtgattcccaaccccagtaaaacagctagggtaagtgagacagcctctcttttagtcctggggtgagaattgtcataggcctgtaacaaaacttcttcaggatagtaatagatgcgaggaatcagctggacctggatacagaaatctctagtctgattaaaaactgaggtggagaggcaaggggtgaggccagtgctgcaagcccaccagctatggttggaggggagcagatactgatggtctccggaggaattgatggatagggtctgattgcagagatgctgatgggtaaagggcacctttcctatgcacaacccgtgtcctgagacctcagtgagggtgagctttccttgggtcccccagcggcaccggtcaaggtcggtggagtaggcgacctctcctgatgaggctattgcttcataataaggggggcccatggccaaacaaagccagcaagactcagtggcccctgggttggtagcatttaaggttaggaaggccccctgcacaagatcaaaaagtctgtcgcctgtggtgggaggcggagtgtttagggtaacaattgtttttctcaccgtgggagtttgtgcactagtcgccagggctgtggagttagagtcggggagagatggcggtggcgcttcccttgggggaagaggaggtgggagagcgagggacgttctaggaggtccttgttccacaaggacgaggtcaggacctactgccacagctggcatgttggtgatttttaagcgaatggtgaactgtacgcctggatgtccagacacatagaatcttaatccccaggtttttcccgttatccagtccttggataattttcctttgtctgtgaaatctattttaagggggttacaccagccggtctggtgacactgttgaaatttttgagtccattcgctattttggtcccattttacagttatgaggtcttttgaggatttagatagccaataaccggtccccgtggtctcacaatcccattctttacagtatagggattctagccccccgcaccttctagcttctgaaagggtccggccatcccggggacatacgtagaaggtagagcttgccattctagtcctagcccgagggtagctgcaccctatggctccccaggtgatttgcttataagcggcagtatagtctgagtccggaggtctgactcgtttagaggacgagacatcggttcccgggatatcccaggactcaagactagccgccaaggcacatacatcaggtttaagtgtgggccaccaagtccaagggggctggactgcctttgtatcccagacaacgtctccagtttgggacagtacctgccaagtgagggtcatgggctggtgggggttcttattttgcagactcgtcccgccgccgccgaatacgcagcttaagaggatgatcagtcttttccagctcccaggactcatctggtgccgaaggtggtgcaggtttgaggtgagaagcatggacccaggcagcaataccatcgacttttaccgcggtcggggtagtcagcaacaccaggtatgggcctttccaccgaggctcaaggctgctgggtcgatggcgtctgacaagcacttgatccccgacctggaacgggtgagggattgttacggtaccaggcttaaagccgaattccaccacactggactagtggatccgagctcggtaccaagcttaagtttaaacgctagcagatctacactcacgcaaggcggaaccacccaccccacagccaaacgcggctaccgcctccggtgggttgtgttggccgactggcccggcgcgtccgtatacacacgtttaaagggccatttgggccgccccgcagaaagtccgcaacccacttaattaagtcgataggtcagggggtgggtcgtcaaactgccgctccttaaaaccccggggcccgtcgttcggggtgctcgttggttggcactcacggtgcggcgaatggcctgtcgtaagttttgtcgcgtttacgggggacagggcaggaggaaggaggaggccgtcccgccggagacaaagccgtcccgggtgtttcctcatggccccttttataccccagccgaggacgcgtgcctggactccccgcccccggagacccccaaaccttcccacaccacaccacccagcgaggccgagcgcctgtgtcatctgcaggagatccttgcccagatgtacggaaaccaggactaccccatagaggacgaccccagcgcggatgccgcggacgatgtcgacgaggacgccccggacgacgtggcctatccggaggaatacgcagaggagctttttctgcccggggacgcgaccggtccccttatcggggccaacgaccacatccctcccccgtgtggcgcatctccccccggtatacgacgacgcagccgggatgagattggggccacgggatttaccgcggaagagctggacgccatggacagggaggcggctcgagccatcagccgcggcggcaagcccccctcgaccatggccaagctggtgactggcatgggctttacgatccacggagcgctcaccccaggatcggaggggtgtgtctttgacagcagccatccagattacccccaacgggtaatcgtgaaggcggggtggtacacgagcacgagccacgaggcgcgactgctgaggcgactggaccacccggcgatcctgcccctcctggacctgcatgtcgtctccggggtcacgtgtctggtcctccccaagtaccaggccgacctgtatacctatctgagtaggcgcctgaacccactgggacgcccgcagatcgcagcggtctcccggcagctcctaagcgccgttgactacattcaccgccagggcattatccaccgcgacattaagaccgaaaatatttttattaacacccccgaggacatttgcctgggggactttggcgccgcgtgcttcgtgcagggttcccgatcaagccccttcccctacggaatcgccggaaccatcgacaccaacgcccccgaggtcctggccggggatccgtataccacgaccgtcgacatttggagcgccggtctggtgatcttcgagactgccgtccacaacgcgtccttgttctcggccccccgcggccccaaaaggggcccgtgcgacagtcagatcacccgcatcatccgacaggcccaggtccacgttgacgagttttccccgcatccagaatcgcgcctcacctcgcgctaccgctcccgcgcggccgggaacaatcgcccgccgtacacccgaccggcctggacccgctactacaagatggacatagacgtcgaatatctggtttgcaaagccctcaccttcgacggcgcgcttcgccccagcgccgcagagctgctttgtttgccgctgtttcaacagaaatgaccgccccctgggggcggtgctgtttgcgggttggcacaaaaagaccccgatccgcgtctgtggtgtttttggcatcatgtcgcagggcgccatgcgtgccgttgttcccattatcccattccttttggttcttgtcggtgtatcgggggttcccaccaacgtctcctccaccacccaaccccaactccagaccaccggtcgtccctcgcatgaagcccccaacatgacccagaccggcaccaccgactctcccaccgccatcagccttaccacgcccgaccacacaccccccatgccaagtattggactggaggaggaggaagaggaggagggggccggggacggcgaacatcttgaggggggagatgggacccgtgacaccctaccccagtccccgggcccagccttcccgttggctgaggacgtcgagaaggacaaacccaaccgtcccgtagtcccatcccccgatcccaacaactcccccgcgcgccccgagaccagtcgcccgaagacaccccccaccattatcgggccgctggcaactcgccccacgacccgactcacctcaaagggacgacccttggttccgacgcctcaacataccccgctgttctcgttcctcactgcctcccccgccctggacaccctcttcgtcgtcagcaccgtcatccacaccttatcgtttttgtgtattggtgcgatggcgacacacctgtgtggcggttggtccagacgcgggcgacgcacacaccctagcgtgcgttacgtgtgcctgccgtccgaacgcgggtagggtatggggcgggggatggggagagcccacatgcggaaagcaagaacaataaaggcggtggtatctagttgatatgcatctctgggtgtttttggggtgtggcggacgcggggcggtcattggacggggtgcagttaaatacatgcccgggacccatgaagcatgcgcgacttccgggcctcagaacccacccgaaacggccaacggacgtctgagccaggcctggctatccggagaaacagcacacgacttggcgttctgtgtgtcgcgatgtctctgcgcgcagtctggcatctggggcttttgggaagcctcgtgggggctgttcttgccgccacccatcggggacctgcggccaacacaacggaccccttaacgcacgccccagtgtcccctcaccccagccccctggggggctttgccgtccccctcgtagtcggtgggctgtgcgccgtagtcctgggggcggcatgtctgcttgagctcctgcgtcgtacgtgccgcgggtgggggcgttaccatccctacatggacccagttgtcgtataatttcccccccccccccccttctccgcgtgggtgatgtcgggtccaaactcccgacaccaccagctggcatggtataaatcaccggtgcgccccccaaaccatgtccggcagggggatgggggggcaatgcggagggcacccaacaacaccgggctaaccaggaaatccgtggccccggcccccaataaagatcgcggtagcccggccgtgtgacactatcgtccataccgaccacaccgacgaatcccccaagggggaggggccattttacgaggaggaggggtataacaaagtctgtctttaaaaagcaggggttagggagttgttcggtcataagcttcagcgcgaacgaccaactaccccgatcatcagttatccttaaggtctcttttgtgtggtgcgttccggtatggggggggctgccgccaggttgggggccgtgattttgtttgtcgtcatagtgggcctccatggggtccgcagcaaatatgccttggtggatgcctctctcaagatggccgaccccaatcgctttcgcggcaaagaccttccggtcctggaccagctgaccgaccctccgggggtccggcgcgtgtaccacatccaggcgggcctaccggacccgttccagccccccagcctcccgatcacggtttactacgccgtgttggagcgcgcctgccgcagcgtgctcctaaacgcaccgtcggaggccccccagattgtccgcggggcctccgaagacgtccggaaacaaccctacaacctgaccatcgcttggtttcggatgggaggcaactgtgctatccccatcacggtcatggagtacaccgaatgctcctacaacaagtctctgggggcctgtcccatccgaacgcagccccgctggaactactatgacagcttcagcgccgtcagcgaggataacctggggttcctgatgcacgcccccgcgtttgagaccgccggcacgtacctgcggctcgtgaagataaacgactggacggagattacacagtttatcctggagcaccgagccaagggctcctgtaagtacgccctcccgctgcgcatccccccgtcagcctgcctctccccccaggcctaccagcagggggtgacggtggacagcatcgggatgctgccccgcttcatccccgagaaccagcgcaccgtcgccgtatacagcttgaagatcgccgggtggcacgggcccaaggccccatacacgagcaccctgctgcccccggagctgtccgagacccccaacgccacgcagccagaactcgccccggaagaccccgaggattcggccctcttggaggaccccgtggggacggtggcgccgcaaatcccaccaaactggcacataccgtcgatccaggacgccgcgacgccttaccatcccccggccaccccgaacaacatgggcctgatcgccggcgcggtgggcggcagtctcctggcagccctggtcatttgcggaattgtgtactggatgcgccgccacactcaaaaagccccaaagcgcatacgcctcccccacatccgggaagacgaccagccgtcctcgcaccagcccttgttttactagatacccccccttaatgggtgcgggggggtcaggtctgcggggttgggatgggaccttaactccatataaagcgagtctggaaggggggaaaggtggacagtcgataagtcggtagcgggggacgcgcacctgttccgcctgtcgcacccacagctttttttgcgaaccgtcccgttccgggatgccgtgccgcccgttgcagggcctggtgctcgtgggcctctgggtctgtgccaccagcctggttgtccgtggccccacggtcagtctggtatcaaactcatttgtggacgccggggccttggggcccgacggcgtagtggaggaagacctgcttattctcggggagcttcgctttgtgggggaccaggtcccccacaccacctactacgatgggggcgtagagctgtggcactaccccatgggacacaaatgcccacgggtcgtgcatgtcgtcacggtgaccgcgtgcccacgtcgccccgccgtggcattcgccctgtgtcgcgcgaccgacagcactcacagccccgcatatcccaccctggagctcaatctggcccaacagccgcttttgcgggtccagagggcaacgcgggactatgccggggtgtacgtgttacgcgtatgggtcggtgacgcgccaaacgccagcctgtttgtcctggggatggccatagccgccgaagggactctggcgtacaacggctcggcctatggctcctgcgacccgaaactgcttccgtcttcggccccgcgtctggccccggcgagcgtataccaacccgcccctaaccaggcctccaccccctcgaccaccacctccaccccctcgaccaccatccccgctccctcgaccaccatccccgctccccaagcatcgaccacgcccttccccacgggagatccaaaaccacaacctcccggggtcaaccacgaacccccatctaatgccacgcgagcgacccgcgactcgcgatacgcgctaacggtgacccagataatccagatagccatccccgcgtccatcatagccctggtgtttctggggagctgtatttgctttatacacagatgtcaacgccgctaccgacgctcccgtcgcccgatttacagcccccagatgcccacgggcatctcatgcgcggtgaacgaagcggccatggcccgcctcggagccgagctcaaatcgcatccgagcaccccccccaaatcccggcgccggtcgtcacgcacgccaatgccctccctgacggccatcgccgaagagtcggagcccgctggggcggctgggcttccgacgccccccgtggaccccacgacacccaccccaacgcctcccctgttggtataggtccacggccactggccgggagcaccacataaccgaccgcagtccctgagttgggaataaaccggtattatttacctatatccgtgtatgtcgatttctttccccccctccccggaaaccaaagaaggaagcaaagaatggatgggaggagttcaggaagccggggagagggcccgcggcgcatttaaggcgttgttgtgttgactttgcctcttctggcgggttggtgcggtgctgtttgttgggctcccattttacccgaagatcggctgctatccccgggacatggatcgcggggcggtggtggggtttcttctcggtgtttgtgttgtatcgtgcttggcgggaacgcccaaaacgtcctggagacgggtgagtgtcggcgaggacgtttcgttgcttccagctccggggcctacggggcgcggcccgacccagaaactactatgggccgtggaacccctggatgggtgcggccccttacacccgtcgtgggtctcgctgatgccccccaagcaggtgcccgagacggtcgtggatgcggcgtgcatgcgcgctccggtcccgctggcgatggcgtacgcccccccggccccatctgcgaccgggggtctacgaacggacttcgtgtggcaggagcgcgcggccgtggttaaccggagtctggttattcacggggtccgagagacggacagcggcctgtataccctgtccgtgggcgacataaaggacccggctcgccaagtggcctcggtggtcctggtggtgcaaccggccccagttccgaccccacccccgaccccagccgattacgacgaggatgacaatgacgagggcgaggacgaaagtctcgccggcactcccgccagcgggaccccccggctcccgcctccccccgcccccccgaggtcttggcccagcgcccccgaagtctcacatgtgcgtggggtgaccgtgcgtatggagactccggaagctatcctgttttcccccggggagacgttcagcacgaacgtctccatccatgccatcgcccacgacgaccagacctactccatggacgtcgtctggttgaggttcgacgtgccgacctcgtgtgccgagatgcgaatatacgaatcgtgtctgtatcacccgcagctcccagaatgtctgtccccggccgacgcgccgtgcgccgcgagtacgtggacgtctcgcctggccgtccgcagctacgcggggtgttccagaacaaaccccccaccgcgctgttcggccgaggctcacatggagcccgtcccggggctggcgtggcaggcggcctccgtcaatctggagttccgggacgcgtccccacaacactccggcctgtatctgtgtgtggtgtacgtcaacgaccatattcacgcctggggccacattaccatcagcaccgcggcgcagtaccggaacgcggtggtggaacagcccctcccacagcgcggcgcggatttggccgagcccacccacccgcacgtcggggcccctccccacgcgcccccaacccacggcgccctgcggttaggggcggtgatgggggccgccctgctgctgtctgcactggggttgtcggtgtgggcgtgtatgacctgttggcgcaggcgtgcctggcgggcggttaaaagcagggcctcgggtaaggggcccacgtacattcgcgtggccgacagcgagctgtacgcggactggagctcggacagcgagggagaacgcgaccaggtcccgtggctggcccccccggagagacccgactctccctccaccaatggatccggctttgagatcttatcaccaacggctccgtctgtatacccccgtagcgatgggcatcaatctcgccgccagctcacaacctttggatccggaaggcccgatcgccgttactcccaggcctccgattcgtccgtcttctggtaaggcgccccatcccgaggccccacgtcggtcgccgaactgggcgaccgccggcgaggtggacgtcggagacgagctaatcgcgatttccgacgaacgcggacccccccgacatgaccgcccgcccctcgccacgtcgaccgcgccctcgccacacccgcgacccccgggctacacggccgttgtctccccgatggccctccaggctgtcgacgccccctccctgtttgtcgcctggctggccgctcggtggctccggggggcttccggcctgggggccgtcctgtgtgggattgcgtggtatgtgacgtcaattgcccgaggcgcataaagggccggtggtccgcctagccgcagcaaattaaaaatcgtgagtcacagcgaccgcaacttcccacccggagctttcttccggcctcgatgacgtcccggctctccgatcccaactcctcagcgcgatccgacatgtccgtgccgctttatcccacggcctcgccagtttcggtcgaagcctactactcggaaagcgaagacgaggcggccaacgacttcctcgtacgcatgggccgccaacagtcggtattaaggcgtcgacgcagacgcacccgctgcgtcggcatggtgatcgcctgtctcctcgtggccgttctgtcgggcggatttggggcgctcctgatgtggctgctccgctaaaagaccgcatcgacacgcgcgtccttcttgtcgtctctcttcccccccatcaccccgcaatttgcacccagcctttaactacattaaattgggttcgattggcaatgttgtctcccggttgatttttgggtgggtggggagtgggtgggtggggagtgggtgggtggggagtgggtgggtggggagtgggtgggtggggagtgggtgggtggggagtgggtgggtggggagtgggtgggtggggagtgggtgggtggggagtgggtgggtggggagtggcaaggaagaaacaagcccgaccaccagacagaaaatgtaaccatacccaaaccgactctgggggctgtttgtggggtcggaaccataggatgaacaaaccaccccgtaccacccgcacccaagggtgcggtggctcatcggcatctgtccggtatgggttgttccccacccactcgcgttcggacgtcttagaatcatggcggttttctatgccgacatcggttttctcccccgcaataagacacgatgcgataaaatctgtttgtaaaatttattaagggtacaaattgccctagcacaggggtggggttagggccgggtccccacacccaaacgcaccaaacagatgcaggcagtgggtcgagtacagccccgcgtacgaacacgtcgatgcgtgtgtcagacagcaccagaaagcacaggccatcaacaggtcgtgcatgtgtcggtgggtttggacgcggggggccatggtggtgataaagttaatggccgccgtccgccagggccacaggggcgacgtctcttggttggcccggagccactgggtgtggaccagccgcgcgtggcggcccaacatggcccctgtagccgggggcgggggatcgcgcacgtttgcagcgcacatgcgagacacctcgaccacggttcgaaagaaggcccggtggtccgcgggcaacatcaccaggtgcgcaagcgcccgggcgtccagagggtagagccctgagtcatccgaggttggctcatcgcccgggtcttgccgcaagtgcgtgtgggttgggcttccggtgggcgggacgcgaaccgcggtgtggatcccgacgcgggcccgagcgtatgctccatgttgtggggagaaggggtctgggctcgccaggggggcatacttgcccgggctatacagacccgcgagccgtacgtggttcgcggggggtgcgtggggtccggggctcccggggagaccggggctcccggggagaccggggctccctgggagaccggggttgtcgtggatccctggggtcacgcggtaccctggggtctctgggagctcgcggtactctgggttccctaggttctcggggtggtcgcggaacccggggctcccggggaacacgcggtgtcctggggattgttggcggtcggacggcttcagatggcttcgagatcgtagtgtccgcaccgactcgtagtagacccgaatctccacattgccccgccgcttgatcattatcaccccgttgcgggggtccggagatcatgcgcgggtgtcctcgaggtgcgtgaacacctctggggtgcatgccggcggacggcacgccttttaagtaaacatctgggtcgcccggcccaactggggccgggggttgggtctggctcatctcgagagccacgggggggaaccaccctccgcccagagactcgggtgatggtcgtacccgggactcaacgggttaccggattacggggactgtcggtcacggtcccgccggttcttcgatgtgccacacccaaggatgcgttgggggcgatttcgggcagcagcccgggagagcgcagcaggggacgctccgggtcgtgcacggcggttctggccgcctcccggtcctcacgcccccttttattgatctcatcgcgtacgtcggcgtacgtcctgggcccaacccgcatggtgtccaggaaggtgtccgccatttccagggcccacgacatgctcccccccgacgagcaggaagcggtccacgcaacggtcgccgccggtcgcctcgacgaggacgttcctcctgcgggaaggcacgaacgcgggtgagccccctcctccgcccccgcgtcccccctcctccgcccccgcgtcccccctcctccgcccccgcgtcccccctcctccgcccccgcgtcccccctcctccgcccccgcgtcccccctcctccgcccccgcgtcccccctcctccacccccgcgtccccccctcctccgcccacccaaggtgcttacccgtgcaaaaaaggcggaccggtgggtttctgtcgtcggaggcccccggggtgcgtcccctgtgtttcgtgggtggggtgggcgggtctttcccccccgcgtccgcgtgtccctttccgatgcgatcccgatcccgagccggggcgtcgcgatgccgacgccgtccgctccgacggccctctgcgactcccgctcccggtccgcgtgctccgcagccgctcccgtcgttcgtggccggcgccgtctgcgggcgtcggtcgcgccgggcctttatgtgcgccggagagacccgccccccgccgcccgggcccgcccccggggccggcgcggagtcgggcacggcgccagtgctcgcacttcgccctaataatatatatatattgggacgaagtgcgaacgcttcgcgttctcacttcttttacccggcggccccgcccccttggggcggtcccgcccgccggccaatgggggggcggcaaggcgggcggcccttgggccgcccgccgtcccgttggtcccggcgtccggcgggcgggaccggggggcccggggacggccaacgggcgcgcggggctcgtatctcattaccgccgaaccgggaagtcggggcccgggccccgccccctgcccgttcctcgttagcatgcggaacggaagcggaaaccgccggatcgggcggtaatgagatgccatgcggggcggggcgcggacccacccgccctcgcgccccgcccatggcagatggcgcggatgggcggggccgggggttcgaccaacgggccgcggccacgggcccccggcgtgccggcgtcggggcggggtcgtgcataatggaattccgttcggggtgggcccgccgggggggcggggggccggcggcctccgctgctcctccttcccgccggcccctgggactatatgagcccgaggacgccccgatcgtccacacggagcgcggctgccgacacggatccacgacccgacgcgggaccgccagagacagaccgtcagacgctcgccgcgccgggacgccgatacgcggacgaagcgcgggagggggatcggccgtccctgtcctttttcccacccaagcatcgaccggtccgcgctagttccgcgtcgacggcgggggtcgtcggggtccgtgggtctcgccccctccccccatcgagagtccgtaggtgacctaccgtgctacgtccgccgtcgcagccgtatccccggaggatcgccccgcatcggcgatggcgtcggagaacaagcagcgccccggctccccgggccccaccgacgggccgccgcccaccccgagcccagaccgcgacgagcggggggccctcgggtggggcgcggagacggaggagggcggggacgaccccgaccacgaccccgaccacccccacgacctcgacgacgcccggcgggacgggagggcccccgcggcgggcaccgacgccggcgaggacgccggggacgccgtctcgccgcgacagctggctctgctggcctccatggtagaggaggccgtccggacgatcccgacgcccgaccccgcggcctcgccgccccggacccccgcctttcgagccgacgacgatgacggggacgagtacgacgacgcagccgacgccgccggcgaccgggccccggcccggggccgcgaacgggaggccccgctacgcggcgcgtatccggaccccacggaccgcctgtcgccgcgcccgccggcccagccgccgcggagacgtcgtcacggccggtggcggccatcggcgtcatcgacctcgtcggactccgggtcctcgtcctcgtcgtccgcatcctcttcgtcctcgtcgtccgacgaggacgaggacgacgacggcaacgacgcggccgaccacgcacgcgaggcgcgggccgtcgggcggggtccgtcgagcgcggcgccggcagcccccgggcggacgccgcccccgcccgggccaccccccctctccgaggccgcgcccaagccccgggcggcggcgaggacccccgcggcctccgcgggccgcatcgagcgccgccgggcccgcgcggcggtggccggccgcgacgccacgggccgcttcacggccgggcagccccggcgggtcgagctggacgccgacgcgacctccggcgccttctacgcgcgctatcgcgacgggtacgtcagcggggagccgtggcccggcgccgggcccccgcccccggggcgggtgctgtacggcggcctgggcgacagccgcccgggcctctggggggcgcccgaggcggaggaggcgcgacgccggttcgaggcctcgggcgccccggcggccgtgtgggcgcccgagctgggcgacgccgcgcagcagtacgccctgatcacgcggctgctgtacaccccggacgcggaggccatggggtggctccagaacccgcgcgtggtccccggggacgtggcgctggaccaggcctgcttccggatctcgggcgccgcgcgcaacagcagctccttcatcaccggcagcgtggcgcgggccgtgccccacctgggctacgccatggcggccggccgcttcggctggggcctggcgcacgcggcggccgccgtggccatgagccgccgatacgaccgcgcgcagaagggcttcctgctgaccagcctgcgccgcgcctacgcgcccctgttggcgcgcgagaacgcggcgctgacgggggccgcggggagccccggcgccggcgcagatgacgagggggtcgccgccgtcgccgccgccgcaccgggcgagcgcgcggtgcccgccgggtacggcgccgcggggatcctcgccgccctggggcggctgtccgccgcgcccgcctcccccgcggggggcgacgaccccgacgccgcccgccacgccgacgccgacgacgacgccgggcgccgcgcccaggccggccgcgtggccgtcgagtgcctggccgcctgccgcgggatcctggaggcgctggccgagggcttcgacggcgacctggcggccgtcccggggctggccggggcccggcccgccagccccccgcggccggagggacccgcgggccccgcttccccgccgccgccgcacgccgacgcgccccgcctgcgcgcgtggctgcgcgagctgcggttcgtgcgcgacgcgctggtgctcatgcgcctgcgcggggacctgcgcgtggccggcggcagcgaggccgccgtggccgccgtgcgcgccgtgagcctggtcgccggggccctgggccccgcgctgccgcgggacccgcgcctgccgagctccgcggccgccgccgccgcggacctgctgtttgacaaccagagcctgcgccccctgctggcggcggcggccagcgcaccggacgccgccgacgcgctggcggccgccgccgcctccgccgcgccgcgggaggggcgcaagcgcaagagtcccggcccggcccggccgcccggaggcggcggcccgcgacccccgaagacgaagaagagcggcgcggacgcccccggctcggacgcccgcgcccccctccccgcgcccgcgcccccctccacgcccccggggcccgagcccgcccccgcccagcccgcggcgccccgggccgccgcggcgcaggcccgcccgcgccccgtggccgtgtcgcgccggcccgccgagggccccgaccccctgggcggctggcggcggcagcccccggggcccagccacacggcggcgcccgcggccgccgccctggaggcctactgctccccgcgcgccgtggccgagctcacggaccacccgctgttccccgtcccctggcgaccggccctcatgtttgacccgcgggccctggcctcgatcgccgcgcggtgcgccgggcccgcccccgccgcccaggccgcgtgcggcggcggcgacgacgacgataacccccacccccacggggccgccgggggccgcctctttggccccctgcgcgcctcgggcccgctgcgccgcatggcggcctggatgcgccagatccccgaccccgaggacgtgcgcgtggtggtgctgtactcgccgctgccgggcgaggacctggccggcggcggggcctcgggggggccgccggagtggtccgccgagcgcggcgggctgtcctgcctgctggcggccctggccaaccggctgtgcgggccggacacggccgcctgggcgggcaattggaccggcgcccccgacgtgtcggcgctgggcgcacagggcgtgctgctgctgtccacgcgggacctggccttcgccggggccgtggagtttctggggctgctcgccagcgccggcgaccggcggctcatcgtggtcaacaccgtgcgcgcctgcgactggcccgccgacgggcccgcggtgtcgcggcagcacgcctacctggcgtgcgagctgctgcccgccgtgcagtgcgccgtgcgctggccggcggcgcgggacctgcgccgcacggtgctggcctcgggccgcgtgttcggcccgggggtcttcgcgcgcgtggaggccgcgcacgcgcgcctgtaccccgacgcgccgccgctgcgcctgtgccgcggcggcaacgtgcgctaccgcgtgcgcacgcgcttcggcccggacacgccggtgcccatgtccccgcgcgagtaccgccgggccgtgctgccggcgctggacggccgggcggcggcctcggggaccaccgacgccatggcgcccggcgcgccggacttctgcgaggaggaggcccactcgcacgccgcctgcgcgcgctggggcctgggcgcgccgctgcggcccgtgtacgtggcgctggggcgcgaggcggtgcgcgccggcccggcccggtggcgcgggccgcggagggacttttgcgcccgcgccctgctggagcccgacgacgacgcccccccgctggtgctgcgcggcgacgacgacggcccgggggccctgccgccggcgccgcccgggattcgctgggcctcggccacgggccgcagcggcaccgtgctggcggcggcgggggccgtggaggtgctgggggcggaggcgggcttggccacgcccccgcggcgggaagttgtggactgggaaggcgcctgggacgaagacgacggcggcgcgttcgagggggacggggtgctgtaacgggccgggacggggcggggcgcttgtgagacccgaagacgcaataaacggcaacaacctgattaagttttgcagtagcgttgtttattcgaggggcgggagggggcgaggggcgggagggggcgaggggcgggagggggcgaggggcgggagggggcgaggggcgggagggggcgaggggcgggagggggcgaggggcgggagggggcgaggggcgggagggggcgaggggcgggagggggcgaggggcgggagggggcgaggggcgggagggggcgaggggcgggagggggcgaggggcgggagggggcgaggggcgggagggggcgaggggcgggagggggcgaggggcgggagggggcgaggggcgggagggggcgaggggcgggagggggcgaggggcgggagggggcgaggggcggtggtggtgcgcg

SEQ ID NO: 26 - DNA, 34 bp, Bacteriophage P1
ataacttcgtataatgtatgctatacgaagttat

SEQ ID NO: 27 - DNA, 34 bp, Bacteriophage P1
ataacttcgtataaagtatcctatacgaagttat

SEQ ID NO: 28 - DNA, 222 bp, Simian virus 40
  misc_feature: Poly a
gacatgataagatacattgatgagtttggacaaaccacaactagaatgcagtgaaaaaaatgctttatttgtgaaatttgtgatgctattgctttatttgtaaccattataagctgcaataaacaagttaacaacaacaattgcattcattttatgtttcaggttcagggggagatgtgggaggttttttaaagcaagtaaaacctctacaaatgtggtaaa

SEQ ID NO: 29 - protein, 76 aa, Finegoldia magna
  misc_feature: Protein L 1st kappa binding domain
KEETPETPETDSEEEVTIKANLIFANGSTQTAEFKGTFEKATSEAYAYADTLKKDNGEYTVDVADKGYTLNIKFAG

SEQ ID NO: 30 - protein, 72 aa, Finegoldia magna
  misc_feature: Protein L 2nd kappa binding domain
KEKTPEEPKEEVTIKANLIYADGKTQTAEFKGTFEEATAEAYRYADALKKDNGEYTVDVADKGYTLNIKFAG

SEQ ID NO: 31 - protein, 72 aa, Finegoldia magna
  misc_feature: Protein L 3rd kappa binding domain
KEKTPEEPKEEVTIKANLIYADGKTQTAEFKGTFEEATAEAYRYADLLAKENGKYTVDVADKGYTLNIKFAG

SEQ ID NO: 32 - protein, 72 aa, Finegoldia magna
  misc_feature: Protein L 4th kappa binding domain
KEKTPEEPKEEVTIKANLIYADGKTQTAEFKGTFAEATAEAYRYADLLAKENGKYTADLEDGGYTINIRFAG

SEQ ID NO: 33 - protein, 73 aa, Finegoldia magna
  misc_feature: Protein L 5th kappa binding domain
KKVDEKPEEKEQVTIKENIYFEDGTVQTATFKGTFAEATAEAYRYADLLSKEHGKYTADLEDGGYTINIRFAG

SEQ ID NO: 34 - protein, 368 aa, Finegoldia magna
  misc_feature: Finegoldia magna Protein L
VENKEETPETPETDSEEEVTIKANLIFANGSTQTAEFKGTFEKATSEAYAYADTLKKDNGEYTVDVADKGYTLNIKFAGKEKTPEEPKEEVTIKANLIYADGKTQTAEFKGTFEEATAEAYRYADALKKDNGEYTVDVADKGYTLNIKFAGKEKTPEEPKEEVTIKANLIYADGKTQTAEFKGTFEEATAEAYRYADLLAKENGKYTVDVADKGYTLNIKFAGKEKTPEEPKEEVTIKANLIYADGKTQTAEFKGTFAEATAEAYRYADLLAKENGKYTADLEDGGYTINIRFAGKKVDEKPEEKEQVTIKENIYFEDGTVQTATFKGTFAEATAEAYRYADLLSKEHGKYTADLEDGGYTINIRFAG

SEQ ID NO: 35 - DNA, 164219 bp, Artificial Sequence
  entire sequence of Synco-2D
cgccagaggcccggcccaccgccgccgccccccggccccggcccccaccgcccggcgtgggcccggggggcggggctgacccctcccaccccccctcgcgccccttccgccttccgccgcgcctcgccctccgcctgcgcgtcaccgcggagcacctggcgcgcctgcgcctgcgacgcgcgggcggggagggggcgccggagccccccgcgacccccgcgacccccgcgacccccgcgacccccgcgacccccgcgcgggtgcgcttctcgccccacgtccgggtgcgccacctggtggtctgggcctcggccgcccgcctggcgcgccgcggctcgtgggcccgcgagcgggccgaccgggctcggttccggcgccgggtggcggaggccgaggcggtcatcgggccgtgcctggggcccgaggcccgtgcccgggccctggcccgcggagccggcccggcgaactcggtctaacgttacacccgaggcggcctgggtcttccgcggagctcccgggagctccgcaccaagccgctctccggagagacgatggcaggagccgcgcatatatacgcttggagccagcccgccctcacagggcgggccgcctcgggggcgggactggccaatcggcggccgccagcgcggcggggcccggccaaccagcgtccgccgagtcttcggggcccggcccattgggcgggagttaccgcccaatgggccgggccgcccacttcccggtatggtaattaaaaacttgcaagaggccttgttccgcttcccggtatggtaattagaaactcattaatgggcggccccggccgcccttcccgcttccggcaattcccgcggcccttaatgggcaaccccggtattccccgcctcccgcgccgcgcgtaaccactcccctggggttccgggttatgctaattgcttttttggcggaacacacggcccctcgcgcattggcccgcgggtcgctcaatgaacccgcattggtcccctggggttccgggtatggtaatgagtttcttcgggaaggcgggaagccccggggcaccgacgcaggccaagcccctgttgcgtcggcgggaggggcatgctaatggggttctttgggggacaccgggttgggcccccaaatcgggggccgggccgtgcatgctaatgatattctttgggggcgccgggttggtccccggggacggggccgccccgcggtgggcctgcctcccctgggacgcgcggccattgggggaatcgtcactgccgcccctttggggaggggaaaggcgtggggtataagttagccctggcccgacagtctggtcgcatttgcacctcggcactcggagcgagacgcagcagccaggcagactcgggccgccccctctccgcatcaccacagaagccccgcctacgttgcgacccccagggaccctccgtccgcgaccctccagccgcatacgacccccatggagccccgccccggagcgagtacccgccggcctgagggccgcccccagcgcgaggtgaggggccgggcgccatgtctggggcgccatattggggggcgccatattggggggcgccatgttgggggacccccgacccttacactggaaccggccgccatgttgggggacccccactcatacacgggagccgggcgccatgttggggcgccatgttagggggcgtggaaccccgtgacactatatatacagggaccgggggcgccatgttagggggtgcggaaccccctgaccctatatatacagggaccggggtcgccctgttgggggtcgccatgtgaccccctgactttatatatacagacccccaacacatacacatggcccctttgactcagacgcagggcccggggtcgccgtgggaccccctgactcatacacagagacacgcccccacaacaaacacacaaggaccggggtcgccgtgttgggggcgtggtccccactgactcatacgcaggccccccttactcacacgcatctaggggggtggggaggagccgcccgccatatttgggggacgccgtgggacccccgactccggtgcgtctggagggcgggagaagagggaagaagaggggtcgggatccaaaggacggacccagaccacctttggttgcagacccctttctcccccctcttccgaggccagcaggggggcaggactttgtgaggcgggggggggagagggggaactcgtgggtgctgattgacgcgggaaatccccccccattcttacccgccccccttttttccccttagcccgccccggatgtctgggtgtttccctgcgaccgagacctgccggacagcagcgactctgaggcggagaccgaagtgggggggcggggggacgccgaccaccatgacgacgactccgcctccgaggcggacagcacggacacggaactgttcgagacggggctgctggggccgcagggcgtggatgggggggcggtctcgggggggagccccccccgcgaggaagaccccggcagttgcgggggcgccccccctcgagaggacggggggagcgacgagggcgacgtgtgcgccgtgtgcacggatgagatcgcgccccacctgcgctgcgacaccttcccgtgcatgcaccgcttctgcatcccgtgcatgaaaacctggatgcaattgcgcaacacctgcccgctgtgcaacgccaagctggtgtacctgatagtgggcgtgacgcccagcgggtcgttcagcaccatcccgatcgtgaacgacccccagacccgcatggaggccgaggaggccgtcagggcgggcacggccgtggactttatctggacgggcaatcagcggttcgccccgcggtacctgaccctgggggggcacacggtgagggccctgtcgcccacccacccggagcccaccacggacgaggatgacgacgacctggacgacggtgaggcggggggcggcaaggaccctgggggaggaggaggaggagggggggggagggaggaataggcgggcgggcgaggaaagggcgggccggggagggggcgtaacctgatcgcgccccccgttgtctcttgcagcagactacgtaccgcccgccccccgccggacgccccgcgcccccccacgcagaggcgccgccgcgccccccgtgacgggcggggcgtctcacgcagccccccagccggccgcggctcggacagcgcccccctcggcgcccatcgggccacacggcagcagtaacaccaacaccaccaccaacagcagcggcggcggcggctcccgccagtcgcgagccgcggcgccgcggggggcgtctggcccctccgggggggttggggttggggttggggttgttgaagcggaggcggggcggccgaggggccggacgggcccccttgtcaacagacccgccccccttgcaaacaacagagaccccatagtgatcagcgactcccccccggcctctccccacaggccccccgcggcgcccatgccaggctccgccccccgccccgggccccccgcgtccgcggccgcgtcgggacccgcgcgcccccgcgcggccgtggccccgtgcgtgcgagcgccgcctccggggcccggcccccgcgccccggcccccggggcggagccggccgcccgccccgcggacgcgcgccgtgtgccccagtcgcactcgtccctggctcaggccgcgaaccaagaacagagtctgtgccgggcgcgtgcgacggtggcgcgcggctcgggggggccgggcgtggagggtgggcacgggccctcccgcggcgccgccccctccggcgccgccccgctcccctccgccgcctctgtcgagcaggaggcggcggtgcgtccgaggaagaggcgcgggtcgggccaggaaaacccctccccccagtccacgcgtccccccctcgcgccggcaggggccaagagggcggcgacgcaccccccctccgactcagggccgggggggcgcggccagggtgggcccgggacccccctgacgtcctcggcggcctccgcctcttcctcctctgcctcttcctcctcggccccgacccccgcgggggccgcctcttccgccgccggggccgcgtcctcctccgcttccgcctcctcgggcggggccgtcggtgccctgggagggagacaagaggaaacctccctcggcccccgcgctgcttctgggccgcgggggccgaggaagtgtgcccggaagacgcgccacgcggagacttccggggccgtccccgcgggcggcctcacgcgctacctgcccatctcgggggtctctagcgtggtcgccctgtcgccttacgtgaacaagactatcacgggggactgcctgcccatcctggacatggagacggggaacatcggggcgtacgtggtcctggtggaccagacgggaaacatggcgacccggctgcgggccgcggtccccggctggagccgccgcaccctgctccccgagaccgcgggtaaccacgtgatgccccccgagtacccgacggcccccgcgtcggagtggaacagcctctggatgacccccgtggggaacatgctgttcgaccagggcaccctagtgggcgccctggacttccgcagcctgcggtctcggcacccgtggtccggggagcagggggcgtcgacccgggacgagggaaaacaataagggacgccccccgtgtttgtggggaggggggggtcgggcgctgggtggtctctggccgcgcccactacaccagccaatccgtgtcggggaggggaaaagtgaaagacacgggcaccacacaccagcgggtcttttgtgttggccctaataaaaaaaaactcaggggatttttgctgtctgttgggaaataaaggtttacttttgtatcttttccctgtctgtgttggatgtatcgcggggatgcgtgggagtgggggtgcgtgggagtgggggtgcgtgggagtgggggtgcgtgggagtgggggtgcgtgggagtgggggtgcgtgggagtgggggtgcgtgggagtgggggtgcgtgggagtgggggtgcgtgggagtgggggtgccatgttgggcaggctctggtgttaaccacagagccgcggcccgggctgcctgaccaccgatccccgaaagcatcctgccactggcatggagccagaaccacagtgggttgggtgtgggtgttaagtttccgcgagcgcctgcccgcccggactgacctggcctctggccgccacaaagggcggggggggttaactacactatagggcaacaaaggatgggaggggtggcggggcgggacggggcgcccaaaagggggtcggccacaccacagacgtgggtgttggggggtggggcggaggggtgggggggggggagacagaaacaggaacatagttagaaaacaagaatgcggtgcagccagagaatcacaggagacgaggggatgggcgtgttggttaccaacccacacccaggcatgctcggtggtatgaaggagggggggcggtgcttcttagagaccgccgggggacgtggggttggtgtgcaaaggcacgcgcacccgcgcggccaggtgggccggtactccatccccccctcccccgacccttcccacccccgcgtgccagagatcaccccggtcccccggcacccgccactcctccgtatcctcgctttaggaacaactttagggggggtacacacgcgccgtgcatttccttccacaccccccctcccccgcactccccccccccaggcagtaagacccaagcatagagagccaggcacaaaaacacaggcggggtgggacacatgccttcttggagtacgtgggtcattggcgtggggggttacagcgacaccggccgaccccctggcggtcttccagccggcccttagataagggggcagttggtggtcggacgggtaagtaacagagtctgactaagggtgggagggggggaaaagaacgggctggtgtgctgtaacacgagcccacccgcgagtggcgtggccgaccttagcctctggggcgccccctgtcgtttgggtcccccccctctattggggagaagcaggtgtctaacctacctggaaacgcggcgtctttgttgaacgacaccggggcgccctcgacgagtgggataacgggggaggaagggagggaggagggtactgggggtgaagaaggggggggggagaagcgagaacaggaaaggcgatggagcccggcagaacaccgaggaaaaaaaaaccacagcgcatgcgccgggccgttgtggggccccgggccggggccccttgggtccgccggggccccgggccgggccgccacgggggccggccgttggcggtaaccccgagtgttcatctcaggccccgggccgggaacccggaaaagcctccggggggcctttttcgcgtcgcgtgccggcgagcgggtccggacggggcccggaccgccgcggtcgggggcccctcgtcccgggccgtacgcggccttcgccccgtgaggggacagacgaacgaaacattccggcgacggaacgaaaaacaccccagacgggttaaagaaacagaaaccgcaacccccaccacccccgaaacggggaaaacgaaaaaacagaccagcggccggccggcgcttagggggaggatgtcgccgacgccccttggccgccccggctgcaggggggcccggagagccgcggcacccggacgcgcccggaaagtctttcgcaccacccgcgatcggcacggccgcgcccccgcttttataaaggctgagatgacgcagcaaaaacaggccacagcaccacgtgggtaggtgatgtaattttattttcctcgtctgcggcctaatggatttccgggcgcggtgcccctgtctgcagagcacttaacggattgatatctcgcgggcacgcgcgcccttaatggaccggcgcggggcggggggccggatacccacacgggcggggggggggtgtcgcgggccgtctgctggcccgcggccacataaacaatgactctgggcctttctgcctctgccgcttgtgagtgcgcgcgccggctctgcggtgtcggcggcggctgcggcggctgcggcggccgccgtgttcggtctcggtagccggccggcgggtggactcgcggggggccggagggtggaaggcaggggggtgtaggatgggtatcaggacttccacttcccgtccttccatcccccgttcccctcggttgttcctcgcctcccccaacaccccgccgctttccgttggggttgttattgttgtcgggatcgtgcgggccgggggtcgccggggcaggggcgggggcgtgggcgggggtgctcgtcgatcgaccgggctcagtgggggcgtggggtgggtgggagaaggcgaggagactggggtgggggtgtcggtgggtggttgttttttgtggttgtttttgtgtctgttcccgtcccccgtcaccccctccctccgtcccctccgtccccccgtcgcgggtgtttgtgtttgtttattccgacattggtttatttaaataaacacagccgttctgcgtgtctgttcttgcgtgtggctgggggcttatatgtggggtcccgggggcgggatggggtttagcggcggggggcggcgcgccggacggggcgctggagataacggcccccggggaacgggggaccggggctgggtatcccgaggtgggtgggtgggcggcggtggccgggccgggccgggccgggccgggccgggtgggcggggtttggaaaaacgaggaggaggaggagaaggcgggggggggggagacggggggaaagcaaggacacggcccggggggtgggagcgcgggccgggccgctcgtaagagccgcgacccggccgccggggagcgttgtcgccgtcggtctgccggcccccgtccctcccttttttgaccaaccagcgccccccccccccctcaccaccattcctactaccaccaccaccaccaccaccgacacctcccgcgcacccccgcccacatccccccccaacccgcaccaccagcacgggttgggggtagcaggggatcaaaggggggcaaagcggcggggcggttcggggggggggggggggggcgggaaaccaagtaggcccgcccatccgcggcccctcccggcagccacgcccccagcgtcgggtgtcacggggaaagagcagaggggagaggggagagggggggagaggggagagggggggagaggggagagggggggagaggggagagggggggagaggggagagggggggagaggggagagggggggagaggggagagggggggagaggggagagggggggagaggggagagggggggagaggggagagggggggagagggggtatataaaccaacgaaaagcgcgggaacggggatacggggcttgtgtggcacgacgtcgtggttgtgttactgggcaaacacttggggactgtaggtttctgtgggtgccgaccctaggcgctatggggattttgggttgggtcgggcttattgccgttggggttttgtgtgtgcgggggggcttgccttcaaccgaatatgttattcggagtcgggtggctcgagaggtgggggatatattaaaggtgccttgtgtgccgctcccgtctgacgatcttgattggcgttacgagaccccctcggctataaactatgctttgatagacggtatatttttgcgttatcactgtcccggattggacacggtcttgtgggataggcatgcccagaaggcatattgggttaacccctttttatttgtggcgggttttttggaggacttgagttaccccgcgtttcctgccaacacccaggaaacagaaacgcgcttggccctttataaagagatacgccaggcgctggacagtcgcaagcaggccgccagccacacacctgtgaaggctgggtgtgtgaactttgactattcgcgcacccgccgctgtgtagggcgacaggatttgggacctaccaacggaacgtctggacggaccccggttctgccgccggacgatgaagcgggcctgcagccgaagcccctcaccacgccgccgcccatcatcgccacgtcggaccccaccccgcgacgggacgccgccacaaaaagcagacgccgacgaccccactcccggcgcctctaacgatgcctcgacggaaacccgtccgggttcggggggcgaaccggccgcctgtcgctcgtcagggccggcggcgctcctcgccgccctagaggctggtcccgctggtgtgacgttttcctcgtccgcgccccccgaccctcccatggatttaacaaacgggggggtgtcgcctgcggcgacctcggcgcctctggactggaccacgtttcggcgtgtgtttctgatcgacgacgcgtggcggcccctgatggagcctgagctggcgaaccccttaaccgcccacctcctggccgaatataatcgtcggtgccagaccgaagaggtgctgccgccgcgggaggatgtgttttcgtggactcgttattgcacccccgacgaggtgcgcgtggttatcatcggccaggacccatatcaccaccccggccaggcgcacggacttgcgtttagcgtgcgcgcgaacgtgccgcctcccccgagtcttcggaatgtcttggcggccgtcaagaactgttatcccgaggcacggatgagcggccacggttgcctggaaaagtgggcgcgggacggcgtcctgttactaaacacgaccctgaccgtcaagcgcggggcggcggcgtcccactctagaatcggttgggaccgtttcgtgggcggagttatccgccggttggccgcgcgccgccccggcctggtgtttatgctctggggcacacacgcccagaatgccatcaggccggaccctcgggtccattgcgtcctcaagttttcgcacccgtcgcccctctccaaggttccgttcggaacctgccagcatttcctcgtggcgaaccgatacctcgagacccggtcgatttcacccatcgactggtcggtttgaaaggcatcgacgtccggggtttttgtcggtgggggcttttgggtatttccgatgaataaagacggttaatggttaaacctctggtctcatacgggtcggtgatgtcgggcgtcgggggagagggagttccctctgcgcttgcgattctagcctcgtggggctggacgttcgacacgccaaaccacgagtcggggatatcgccagatacgactcccgcagattccattcggggtgccgctgtggcctcacctgaccaacctttacacgggggcccggaacgggaggccacagcgccgtctttctccccaacgcgcgcggatgacggcccgccctgtaccgacgggccctacgtgacgtttgataccctgtttatggtgtcgtcgatcgacgaattagggcgtcgccagctcacggacaccatccgcaaggacctgcggttgtcgctggccaagtttagcattgcgtgcaccaagacctcctcgttttcgggaaacgccccgcgccaccacagacgcggggcgttccagcgcggcacgcgggcgccgcgcagcaacaaaagcctccagatgtttgtgttgtgcaaacgcgcccacgccgctcgagtgcgagagcagcttcgggtcgttattcagtcccgcaagccgcgcaagtattacacgcgatcttcggacgggcggctctgccccgccgtccccgtgttcgtccacgagttcgtctcgtccgagccaatgcgcctccaccgagataacgtcatgctggcctcgggggccgagtaaccgccccccccccatgccaccctcactgcccgtcgcgcgtgtttgatgttaataaataacacataaatttggctggttgtttgttgtctttaatggaccgcccgcaagggggggggggcatttcagtgtcgggtgacgagcgcgatccggccgggatcctaggaccccaaaagtttgtctgcgtattccagggcggggctcagttgaatctcccgcagcacctctaccagcaggtccgcggtgggctggagaaactcggccgtcccggggcaggcggttgtcgggggtggaggcgcggcgcccaccccgtgtgccgcgcctggcgtctcctctgggggcgacccgtaaatggttgcagtgatgtaaatggtgtccgcggtccagaccacggtcaaaatgccggccgtggcgctccgggcgctttcgccgcgcgaggagctgacccaggagtcgaacggatacgcgtacatatgggcgtcccacccgcgttcgagcttctggttgctgtcccggcctataaagcggtaggcacaaaattcggcgcgacagtcgataatcaccaacagcccaatgggggtgtgctggataacaacgcctccgcgcggcaggcggtcctggcgctcccggccccgtaccatgatcgcgcgggtgccgtactcaaaaacatgcaccacctgcgcggcgtcgggcagtgcgctggtcagcgaggccctggcgtggcataggctatacgcgatggtcgtctgtggattggacatctcgcggtgggtagtgagtcccccgggccgggttcggtggaactgtaaggggacggcgggttaatagacaatgaccacgttcggatcgcgcagagccgatagtatgtgctcactaatgacgtcatcgcgctcgtggcgctcccggagcggatttaagttcatgcgaaggaattcggaggaggtggtgcgggacatggccacgtacgcgctgttgaggcgcaggttgccgggcgtaaagcagatggcgaccttgtccaggctaaggccctgggagcgcgtgatggtcatggcaagcttggagctgatgccgtagtcggcgtttatggccatggccagctccgtagagtcaatggactcgacaaactcgctgatgttggtgttgacgacggacatgaagccgtgttggtcccgcaagaccacgtaaggcaggggggcctcttccagtaactcggccacgttggccgtcgcgtgccgcctccgcagctcgtccgcaaaggcaaacacccgtgcgtacgtgtatcccatgagcgtataattgtccgtctgcagggcgacggacatcagccccccgcgcggcgagccggtcagcatctcgcagccccggaagataacgttgtccacgtacgtgctaaagggggcgacttcaaatgcctccccgaagagctcttggaggattcggaatctcccgaggaaggcccgcttcagcagcgcaaactgggtgtgaacggcggcggtggtctccggttccccgggggtgtagtggcagtaaaacacgtcgagctgttgttcgtccagccccgcgaaaataacgtcgaggtcgtcgtcgggaaaatcgtccgggcccccgtcccgcggccccagttgcttaaaatcaaacgcacgctcgccgggggcgcctgcgtcggccattaccgacgcctgcgtcggcacccccgaagatttggggcgcagagacagaatctccgccgttagttctcccatgcgggcgtaggcgagggtcctctgggtcgcatccaggcccgggcgctgcagaaagttgtaaaaggagataagcccgctaaatatgagccgcgacaggaacctgtaggcaaactccaccgaagtctccccctgagtctttacaaagctgtcgtcacgcaacactgcctcgaaggcccggaacgtcccactaaacccaaaaaccagttttcgcaggcgcgcggtcaccgcgatctggctgttgaggacgtaagtgacgtcgttgcgggccacgaccagctgctgtttgctgtgcacctcgcagcgcatgtgccccgcgtcctggtcctggctctgcgagtagttggtgatgcggctggcgttggccgtgagccacttttcaatcgtcaggccgggctggtgtgtcagccgtcggtattcgtcaaactccttgaccgacacgaacgtaagcacggggagggtgaacacgacgaactccccctcacgggtcaccttcaggtaggcgtggagcttggccatgtacgcgctcacctctttgtgggaggagaacagccgcgtccagccggggaggttggcggggttggtgatgtagttttccgggacgacgaagcgatccacgaactgcatgtgctcctcggtgatgggcaggccgtactccagcaccttcatgaggttaccgaactcgtgctcgacgcaccgtttgttgttaataaaaatggcccagctatacgagaggcgggcgtactcgcgcagcgtgcggttgcagatgaggtacgtgagcacgttctcgctctggcggacggaacaccgcagtttctggtgctcgaaggtcgactccagggacgccgtctgcgtcggcgagcccacacacaccaacacgggccgcaggcgggccgcgtactggggggtgtggtacagggcgttaatcatccaccagcaatacaccacggccgtgaggaggtgacgcccaaggagcccggcctcgtcgatgacgatcacgttgctgcgggtaaaggccggcagcgccccgtgggtggccggggccaaccgcgtcagggcgccctcggccaaccccagggtccgttccagggcggccagggcgcgaaactcgttccgcaactcctcgcccccggaggcggccagggcgcgcttcgtgaggtccaaaatcacctcccagtagtacgtcagatctcgtcgctgcaggtcctccagcgaggcggggttgctggtcagggtgtacgggtactgtcccagttgggcctggacgtgattcccgcgaaacccaaattcatgaaagatggtgttgatgggtcggctgagaaaggcgcccgagagtttggcgtacatgttttgggccgcaatgcgcgtggcgcccgtcaccacacagtccaagacctcgttgattgtctgcacgcacgtgctctttccggagccagcgttgccggtgataagatacaccgcgaacggaaactccctgaggggcaggcctgcgggggactctaaggccgccacgtcccggaaccactgcagatggggcacttgcgctccgtcgagctgttgttgcgagagctctcggatgcgcttaaggattggctgcaccccgtgcatagacgtaaaatttaaaaaggcctcggccctccctggaacggctggtcggtccccgggttgctgaaggtgcggcgggccgggtttctgtccgtctagctggcgctccccgccggccgccgccatgaccgcaccacgctcgcgggcccccactacgcgtgcgcggggggacacggaagcgctgtgctcccccgaggacggctgggtaaaggttcaccccagccccggtacgatgctgttccgcgagattctccacgggcagctggggtataccgagggccagggggtgtacaacgtcgtccggtccagcgaggcgaccacccggcagctgcaggcggcgatctttcacgcgctcctcaacgccaccacttaccgggacctcgaggcggactggctcggccacgtggcggcccgcggtctgcagccccaacggctggttcgccggtacaggaacgcccgggaggcggatatcgccggggtggccgagcgggtgttcgacacgtggcggaacacgcttaggacgacgctgctggactttgcccacgggttggtcgcctgctttgcgccgggcggcccgagcggcccgtcaagcttccccaaatatatcgactggctgacgtgcctggggctggtccccatattacgcaagcgacaagaagggggtgtgacgcagggtctgagggcgtttctcaagcagcacccgctgacccgccagctggccacggtcgcggaggccgcggagcgcgccggccccgggttttttgagctggcgctggccttcgactccacgcgcgtggcggactacgaccgcgtgtatatctactacaaccaccgccggggcgactggctcgtgcgagaccccatcagcgggcagcgcggagaatgtctggtgctgtggccccccttgtggaccggggaccgtctggtcttcgattcgcccgtccagcggctgtttcccgagatcgtcgcgtgtcactccctccgggaacacgcgcacgtctgccggctgcgcaataccgcgtccgtcaaggtgctgctggggcgcaagagcgacagcgagcgcggggtggccggtgccgcgcgggtcgttaacaaggtgttgggggaggacgacgagaccaaggccgggtcggccgcctcgcgcctcgtgcggcttatcatcaacatgaagggcatgcgccacgtaggcgacattaacgacaccgtgcgttcctacctcgacgaggccggggggcacctgatagacgccccggccgtcgacggtaccctccctggattcggcaagggcggaaacagccgcgggtctgcgggccaggaccagggggggcgggcgccgcagcttcgccaggccttccgcacggccgtggttaacaacatcaacggcgtgttggagggctatataaataacctgtttggaaccatcgagcgcctgcgcgagaccaacgcgggcctggcgacccaattgcaggagcgcgaccgcgagctccggcgcgcaacagcgggggccctggagcgccagcagcgcgcggccgacctggcggccgagtccgtgaccggtggatgcggcagccgccctgcgggggcggacctgctccgggccgactatgacattatcgacgtcagcaagtccatggacgacgacacgtacgtcgccaacagctttcagcacccgtacatcccttcgtacgcccaggacctggagcgcctgtcgcgcctctgggagcacgagctggtgcgctgttttaaaattctgtgtcaccgcaacaaccagggccaagagacgtcgatctcgtactccagcggggcgatcgccgcattcgtcgccccctactttgagtcagtgcttcgggccccccgggtaggcgcgcccatcacgggctccgatgtcatcctgggggaggaggagttatgggatgcggtgtttaagaaaacccgcctgcaaacgtacctgacagacatcgcggccctgttcgtcgcggacgtccagcacgcagcgctgcccccgcccccctccccggtcggcgccgatttccggcccggcgcgtccccgcggggccggtccagatcgcggtcgcccggaagaactgcgcgaggcgcgccggaccagggcgggggcatcgggcaccgggatggccgccgcgacggccgacgatgaggggtcggccgccaccatcctcaagcaggccatcgccggggaccgcagcctggtcgaggcggccgaggcgattagccagcagacgctgctccgcctggcctgcgaggtgcgccaggtcggcgaccgccagccgcggtttaccgccaccagcatcgcgcgcgtcgacgtcgcgcctgggtgccggttgcggttcgttctggacgggagtcccgaggacgcctatgtgacgtcggaggattactttaagcgctgctgcggccagtccagttatcgcggcttcgcggtggcggtcctgacggccaacgaggaccacgtgcacagcctggccgtgccccccctcgttctgctgcaccggttctccctgttcaaccccagggacctcctggactttgagcttgcctgtctgctgatgtacctggagaactgcccccgaagccacgccaccccgtcgacctttgccaaggttctggcgtggctcggggtcgcgggtcgccgcacgtccccattcgaacgcgttcgctgccttttcctccgcagttgccactgggtcctaaacacactcatgttcatggtgtacgtaaaaccgttcgacgacgagttcgtcctgccccactggtacatggcccggtacctgctggccaacaacccgccccccgttctctcggccctgttctgtgccaccccgacgagctcctcattccggctgccggggccgcccccccgctccgactgcgtggcctataaccccgccgggatcatggggagctgctgggcgtcggaggaggtgcgcgcgcctctggtctattggtggctttcggagaccccaaaacgacagacgtcgtcgctgttttatcagttttgttgaattttaggaaataaacccggttttgtttctgtggcctcccgacggatgcgcgtgtccttactccgtcttggtgggtgggtggctgtgtatggcgtcccatctgtgcggggaggggggcaagtcggcacgtattcggacagactcaagcacacacgggggagcgctcttgtctcagggcaatgtttttattggtcaaactcaggcaaacagaaacgacatcttgtcgtcaaagggatacacaaacttccccccctcgccccatactcccgccagcaccccggtaaacaccaactcaatctcgcgcaggatttcgcgcaggtgatgagcgcagtccacgggggggagcacaaggggccgcgggtatagatcgacggggacgccgaccgactccccgcctccgggacagacacgcacgacgcgccgccagtagtgctctgcgtccagcaaggcgccgccgcggaaggcagtggggggcaaggggtcgctggcctcaaagggggacacccgaacgctccagtactccgcgtccaaccgtttattaaacgcgtccaagataaggcggtcgcaggcgtcctccataaggccccgggccgtgagtgcgtcctcctccggcacgcatgccgttgtcaggcccaggacccgtcgcagcgtgtcgcgtacgacccctgccgccgtggtgtacgcgggcccgcggagaggaaatcccccaagatggtcagtgttgtcgcgggagttccagaaccacactcccgcctggctccaggcgactgcgtgggtgtagacgccctcgagggccaggcacagtgggtgccgcagccggacggcgttggccctaagcacggctcccacggccgtctcgatggcccgccgggcgtcctcgatcaccccggaagccgcatccgcgtcttgggggtccacgttaaagacaccccagaacgcacccccatcgcccccgcagaccgcgaacttcaccgagctggccgtctcctcgatctgcaggcagacggcggccattaccccacccaggagctgccgcagcgcagggcaggcgttgcacgtgtccgggaccaggcgctccaagacggccccggcccagggctctgagggagcggccaccaccagcgcgtccagtcttgctaggcccgtccggccgtgggggtccgccagcccgctccccccgaggtcggccagggccgccaggagctgggcgcgaagtccggggaagcaaaaccgcgccgtccagacgggcccgacggccgcgggcgggtctaacagttggatgattttagtggcgggatgccaccgcgccaccgcctcccgcaccgcgggcaggaggcatccggctgccgccgaggccacgccgggccaggctcgcggggggaggacgaccctggcccccaccgcgggccaggcccccaggagcgcggcgtaagcggccgcggccccgcgcaccaggtcccgtgccgactcggccgtggccggcacggtgaacgtgggccaacccggaaaccccaggacggcaaagtacgggacgggtcccccccggacctcaaactcgggccccagaaaggcaaagacgggggccagggccccgggggcggcgtggaccgtggtatgccactgccggaaaagggcgacgagcgccggcgcggagaacttctcgccggcgcttacaaagtagtcgtaatcgcggggcagcagcacccgtgccgtgactcgttgcgggtgcccgcgtggccgcaggcccacctcgcacacctcgaccaggtccccgaacgcgccctccttcttgatcggcggaaacgcaagagtctggtattcgcgcgcaaatagcgcggttccggtggtgatgttaacggtcagcgaagcggcggacgcgcactggggggtgtcgcgaatggccgccaggcgcgcccacgccagccgcgcgtcgggatgctcggcaacgcgcgccgccagggccatagggtcgatgtcaatgttggcctccgcgaccaggagagcggcgcgaggggcggcgggcgggccccacgacgctctctcaactttcaccaccagtcccgtgcgtgggtccgagccgatacgcagcggggcgaacagggccaccggcccggtctggcgctccagggccgccaggacgcacgcgtacagcgcccgccacagagtcgggttctccaggggctccagcggggaggcggccggcgtcgtcgcggcgcgggcggccgccacgacggcctggacggagacgtccgcggagccgtagaaatcccgcagctccgtcgcggtgacggagacctccgcaaagcgcgcgcgaccctcccctgcggcgttgcgacatacaaaatacaccagggcgtggaagtactcgcgagcgcgggggggcagccataccgcgtaaagggtaatggcgctgacgctctcctccacccacacgatatctgcggtgtccatcgcacggcccctaaggatcacgggcggtctgtgggtcccatgctgccgtgcctggccgggcccggtgggtcgcggaaaccggtgacggggggggggcggtttttggggttggggtgggggtgggaaacggcccgggtccgggggccaacttggcccctcggtgcgttccggcaacagcgccgccggtccgcggacgaccacgtaccgaacgagtgcggtcccgagacttatagggtgctaaagttcaccgccccctgcatcatgggccaggcctcggtggggagctccgacagcgccgcctccaggatgatgtcagcgttggggttggcgctggatgagtgcgtgcgcaaacagcgcccccacgcgggcacgcgtagcttgaagcgcgcgcccgcaaactcccgcttgtgggccataagcagggcgtacagctgcctgtgggtccggcaggcgctgtggtcgatgtggtgggcgtccaacaaccccacgattgtctgtttggtgaggtttttaacgcgccccgccccgggaaacgtctgcgtgcttttggccatctgcacgccaaacagttcgccccagattatcttgaacagcgccaccgcgtggtccgtctcgctaacggacccgcgcgggggacagccgcttagggcgtcggcgacgcgcttgacggcttcctccgagagcagaagtccgtcggttacgttacagtggcccagttcgaacaccagctgcatgtagcggtcgtagtggggggtcagtaggtccagcacgtcatcggggccgaaggtcctcccagatcccccggccgccgagtcccaatgcaggcgcgcggccatggtgctgcacaggcacaacagctcccagacgggggttacgttcagggtggggggcagggccacgagctccagctctccggtgacgttgatcgtggggatgacgcccgtggcgtagtggtcatagatccgccgaaatatggcgctgctgcgggtggccatgggaacgcggagacaggcctccagcaacgccaggtaaataaaccgcgtgcgtcccatcaggctgttgaggttgcgcatgagcgcgacaatttccgccggcgcgacatcggaccggaggtatttttcgacgaaaagacccacctcctccgtctcggcggcctgggccggcagcgacgcctcgggatcccggcaccgcagctcccgtagatcgcgctgggccctgagggcgtcgaaatgtacgccccgcaaaaacagacagaagtcctttggggtcagggtatcgtcgtgtccccagaagcgcacgcgtatgcagtttagggtcagcagcatgtgaaggatgttaaggctgtccgagagacacgccagcgtgcatctctcaaagtagtgtttgtaacggaatttgttgtagatgcgcgacccccgccccagcgacgtgtcgcatgccgacgcgtcacagcgccccttgaaccggcgacacagcaggtttgtgacctgggagaactgcgcgggccactggccgcaggaactgaccacgtgattaaggagcatgggcgtaaagacgggctccgagcgcgccccggagccgtccatgtaaatcagtagctcccccttgcggagggtgcgcacccgtcccagggactggtacacggacaccatgtccggtccgtagttcatgggtttcacgtaggcgaacatgccatcaaagtgcaggggatcgaagctgaggcccacggttacgaccgtcgtgtatataaccacgcggtattggccccacgtggtcacgtccccgaggggggtgagcgagtgaagcaacagcacgcggtccgtaaactgacggcagaaccgggccacgatctccgcgaaggagaccgtcgacgaaaaaatgcagatgttatcgcccccgccaaggcgcgcttccagctccccaaagaacgtggccccccgggcctccggagaggcgtccggagacgggccgctcggcggcccgggcgggcgcagggcagcctgcaggagctcggtccccagacgcgggagaaacaggcaccggcgcgccgaaaacccgggcatggcgtactcgccgaccaccacatgcacgtttttttcgccccggagaccgcacaggaagtccaccaactgcgcgttggcggttgcgtccatggcgatgatccgaggacagatgcgcagcaggcgtagcattaacgcatccacgcggcccagttgctgcatcgttggcgaatagagctggcccagcgtcgacataacctcgtccagaacgaggacgtcgtagttgttcagaaggttggggcccacgcgatgaaggctttccacctggacgataagtcggtggaaggggcggtcgttcataatgtaattggtggatgagaagtaggtgacaaagtcgaccaggcctgactcagcgaaccgcgtcgctagggtctgggtaaaactccgacgacaggagacgacgagcacactcgtgtccggagagtggatcgcttcccgcagccagcggatcagcgcggtagtttttcccgaccccattggcgcgcggaccacagtcacgcacctggccgtcggggcgctcgcgttggggaaggtgacgggtccgtgctgctgccgctcgatcgttgttttcgggtgaacccggggcacccattcggccaaatcccccccgtacaacatccgcgctagcgatacgctcgacgtgtactgttcgcactcgtcgtccccaatgggacgcccggcccccagaggatctcccgactccgcgccccccacgaaaggcatgaccggggcgcggacggcgtggtgggtctggtgtgtgcaggtggcgacgtttgtggtctctgcggtctgcgtcacggggctcctcgtcctggcctctgtgttccgggcacggtttccctgcttttacgccacggcgagctcttatgccggggtgaactccacggccgaggtgcgcgggggtgtagccgtgcccctcaggttggacacgcagagccttgtgggcacttatgtaatcacggccgtgttgttgttggccgtggccgtgtatgccgtggtcggcgccgtgacctcccgctacgaccgcgccctggacgcgggccgccgtctggctgcggcccgcatggccatgccgcacgccacgctgatcgccggaaacgtctgctcttggttgctgcagatcaccgtcctgttgctggcccatcgcatcagccagctggcccacctggtttacgtcctgcactttgcgtgtctggtgtattttgcggcccatttttgcaccaggggggtcctgagcgggacgtatctgcgtcaggtgcacggcctgatggagctggccccgacccatcatcgcgtcgtcggcccggctcgcgccgtgctgacaaacgccttgctgttgggcgtcttcctgtgcacggccgacgccgcggtatccctgaataccatcgccgcgttcaactttaatttttcggccccgggcatgctcatctgcctgaccgtgctgttcgccattctcgtcgtatcgctgttgttggtggtcgagggggtgttgtgtcactacgtgcgcgtgttggtgggcccccacctgggggccgtggccgccacgggcatcgtcggcctggcctgcgagcactattacaccaacggctactacgttgtggagacgcagtggccgggggctcagacgggagtccgcgtcgccctcgccctggtcgccgcctttgccctcggcatggccgtgctccgctgcacccgcgcctatctgtatcacaggcggcaccacaccaaattttttatgcgcatgcgcgacacgcgacaccgcgcacattccgccctcaagcgcgtacgcagttccatgcgcggatcgcgagacggccgccacaggcccgcacccggcagcccgcccgggattcccgaatatgcggaagacccctacgcgatctcatacggcggccagctcgaccggtacggagattccgacggggagccgatttacgacgaggtggcggacgaccaaaccgacgtattgtacgccaagatacaacacccgcggcacctgcccgacgacgatcccatctatgacaccgttggggggtacgaccccgagcccgccgaggaccccgtgtacagcaccgtccgccgttggtagctgtttggttccgttttaataaaccgtttgtgtttaacccgaccgtggtgtatgtctggtgtgtggcgtccgatcccgttactatcaccgtccccccccccccctcaaccccggcgattgtgggttttttaaaaacgacacgcgtgcgaccgtatacagaacattgttttggtttttattcgctatcggacatggggggtggaaactgggtggcggggcaggcgcctccgggggtccgccggtgagtgtggcgcgagggggggtccgatgaacgcaggcgctgtctccccggggcccgcgtaaccccgcgcatatccgggggcacgtagaaattaccttcctcttcggactcgatatccacgacgtcaaagtcgtgggcggtcagcgagacgacctccccgtcgtcggtgatgaggacgttgtttcggcagcagcagggccgggccccggagaacgagaggcccatagctcggcgagcgtgtcgtcgaatgccaggcggctgcttcgctggatggccttatagatctccggatcgatgcggacgggggtaatgatcagggcgatcggaacggcctggttcgggagaatggacgccttgctgggtcctgcggccccgagagccccggcgccgtcctccaggcggaacgttacgccctcctccgcgctggtgcggtgcctgccgataaacgtcaccagatgcgggtggggggggcagtcggggaagtggctgtcgagcacgtagccctgcaccaagatctgcttaaagttcgggtgacgggggttcgcgaagacgggctcgcggcggaccagatccccggagctccaggacacgggggagatggtgtggcgtccgaggtcgggggcgccaaacagaagcacctccgagacaacgccgctatttaactccaccaaggcccgatccgcggcggagcaccgccttttttcgcccgaggcgtgggcctctgaccaggcctggtcttgcgtgacgagagcctcctccgggccggggacgcgcccgggcgcgaagtatcgcacgctgggcttcgggatcgaccggataaatgcccggaacgcctccggggaccggtgtgccatcaagtcctcgtacgcggaggccgtggggtcgctggggtccatggggtcgaaagcgtacttggcccggcatttgacctcgtaaaaggccaggggggtcttggggactggggccaggtagccgtgaatgtcccgaggacagacgagaatatccagggacgccccgaccatccccgtgtgaccgtccatgaggaccccacacgtatgcacgttctcttcggcgaggtcgctgggttcgtggaagataaagcgccgcgtgtcggcgccggcctcgccgccgtcgtccgcgcggcccacgcagtagcgaaacagcaggcttcgggccgtcggctcgttcacccgcccgaacatcaccgccgaagactgtacatccggccgcaggctggcgttgtgcttcagccactggggcgagaaacacggaccctgggggccccagcggagggtggatgcggtcgtgaggccccgccggagcagggcccatagctggcagtcggcctggttttgcgtggccgcctcgtaaaaccccatgaggggccggggcgccacggcgtccgcggcggccgggggcccgcggcgcgtcaggcgccataggtgccgaccgagtccgcggtccaccatacccgcctcctcgaggaccacggccagggaacacagataatccaggcgggcccagaggggaccgatggccagaggggcgcggacgccgcgcagcaacccgcgcaggtggcgctcgaacgtctcggctagtatatgggagggcagcgcgttggggatcaccgacgccgaccacatagagtcaaggtccggggagtcgggatcggcgtccgggtcgcgggcgtgggtgcccccaggagatagcggaatgtctggggtcggaggccctgaggcgtcagaaagtgccggcgacgcggcccggggcttttcgtctgcggtgtcggtggcgtgctgatcacgtggggggttaacgggcgaatgggagctcgggtccacagctgatgtcgtctggggtggggggggcaggggacggaaggtggttgtcagcggaagactgttagggcgggggcgcttgggggggctgtcggggccacgaggggtgtcctcggccagggcccagggacgcttagtcacggtgcgtcccggcggacatgctgggcctaccgtggactccatttccgagacgacgtggggggagcggtggttgagcgcgccgccgggtgaacgctgattctcacgacagcgcgtgccgcgcgcacgggttggtgtgacacaggcgggacaccagcaccaggagaggcttaagctcgggaggcagcgccaccgacgacagtatcgccttgtgtgtgtgctggtaatttatacaccgatccgtaaacgcgcgccgaatcttgggattgcggaggtggcgccggatgccctctgggacgtcatacgccaggccgtgggtgttggtctcggccgagttgacaaacagggctgggtgcagcacgcagcgataggcgagcagggccagggcgaagtccggcgacagctggttgttaaaatactggtaaccgggaaaccgggtcacgggtacgcccaggctcggggcgacgtacacgctaaccaccaactccagcagcgtctggcccagggcgtacaggtcaaccgctaacccgacgtcgtgcttcaggcggtggttggtaaattcggcccgttcgttgttaaggtatttcaccaacagctccgggggctggttatacccgtgacccaccagggtgtgaaagttggctgtggttagggcggtgggcatgccaaacatccggggggacttgaggtccggctcctggaggcaaaactgcccccgggcgatcgtggagttggagttgagggtgacgaggctaaagtcggcgaggacggcccgccggagcgagacggcgtccgaccgcagcatgacgaggatgttggcgcacttgatatccaggtggctgatcccgcaggtggtgtttaaaaacacaacggcgcgggccagctccgtgaagcactggtggagggccgtcgagaccgaggggtttgttgtgcgcagggacgccagttggccgatatacttaccgaggtccatgtcgtacgcggggaacactatctgtcgttgttgcagcgagaacccgaggggcgcgatgaagccgcggatgttgtgggtgcggccggcgcgtagaacgcactccccgaccaacagggtcgcgatgagctcaacggcaaaccactccttttcctttatggtcttaacggcaagcttatgttcgcgaatcagttggacgtcaccgtatcccccagaccccccgaagcttcgggccccggggatctcgagggtcgtgtagtgtagggcggggttgatggcgaacacggggctgcatagcttgcggatgcgcgtgagggtgaggatgtgcgagggggacgaggggggtgcggttaacgccgcctgggatctgcgcaggggcgggcggttcagtttggccgccgtaccgggcgtctcgggggacgcgcggcgatgagacgagcggctcattcgccatcgggatagtcccgcgcgaagccgctcgcggaggccggatcggtggcgggacccgtgggaggagcgggagacggcggcgtcctggagagaggggccgctggggcgcccggaggccccgtgggggttggagtgtacgtaggatgcgagccaatccttgaaggaccgttggcgtgcaccttgggggctgaggttagctgccacatgaccagcaggtcgctgtctgcgggactcatccatccttcggccaggtcgccgtctccccacagagaagcgttggtcgctgcttcctcgagttgctcctcctggtccgcaagacgatcgtccacggcgtccaggcgctcaccaagcgccggatcgaggtaccgtcggtgtgcggttagaaagtcacgacgcgccgcttgctcctccacgcgaattttaacacaggtcgcgcgctgtcgcatcatctctaagcgcgcgcgggactttagccgcgcctccaattccaagtgggccgcctttgcagccataaaggcgccaacaaaccgaggatcttgggtgctgacgccctcccggtgcagctgcagggtctggtccttgtaaatctcggctcggaggtgcgtctcggccaggcgtcggcgcagggccgcgtgggcggcatctcggtccattccgccaccctgcgggcgacccggggggtgctctgatagtctcgcgtgcccaaggcccgtgatcggggtacttcgccgccgcgacccgccacccggtgtgcgcgatgtttggtcagcagctggcgtccgacgtccagcagtacctggagcgcctcgagaaacagaggcaacttaaggtgggcgcggacgaggcgtcggcgggcctcaccatgggcggcgatgccctacgagtgccctttttagatttcgcgaccgcgacccccaagcgccaccagaccgtggtccctggcgtcgggacgctccacgactgctgcgagcactcgccgctcttctcggccgtggcgcggcggctgctgtttaatagcctggtgccggcgcaactaaaggggcgtgatttcgggggcgaccacacggccaagctggaattcctggcccccgagttggtacgggcggtggcgcgactgcggtttaaggagtgcgcgccggcggacgtggtgcctcagcgtaacgcctactatagcgttctgaatacgtttcaggccctccaccgctccgaagcctttcgccagctggtgcactttgtgcgggactttgcccagctgctcaaaacctccttccgggcctccagcctcacggagaccacgggcccccccaaaaaacgggccaaggtggacgtggccacccacggccggacgtacggcacgctggagctgttccaaaaaatgatccttatgcacgccacctactttctggccgccgtgctcctcggggaccacgcggagcaggtcaacacgttcctgcgtctcgtgtttgagatccccctgtttagcgacgcggccgtgcgccacttccgccagcgcgccaccgtgtttctcgtcccccggcgccacggcaagacctggtttctggtgcccctcatcgcgctgtcgctggcctcctttcgggggatcaagatcggctacacggcgcacatccgcaaggcgaccgagccggtgtttgaggagatcgacgcctgcctgcggggctggttcggttcggcccgagtggaccacgttaaaggggaaaccatctccttctcgtttccggacgggtcgcgcagtaccatcgtgtttgcctccagccacaacacaaacgtaagtcctcttttctttcgcatggctctcccaaggggccccgggtcgacccgacccacacccacccacccacatacacacacaaccagacgcgggaggaaagtctgccccgtgggcactgatttttattcgggatcgcttgaggaggcccgggcaacggcccgggcaacggtggggcaactcgtagcaaataggcgactgatgtacgaagagaagacacacaggcgccacccggcgctggtcggggggatgttgtccgcgccgcaccgtcccccgacgacctcttgcagacggtccgtgatgcaaggacggcggggggcctgcagcagggtgaccgtatccacgggatggccaaagagaagcggacacaggctagcatccccctggaccgccagggtacactgggccatcttggcccacagacacggggcgacgcagggacaggactccgttacgacggaggagagccacagtgcgttggcggaatcgatgtggggcggcggggcgcaggactcgcagccccccgggtggttggtgatcctggccaggagccatcccagatggcgggccctgcttcccggtggacagagcgaccccaggtcgctgtccatggcccagcagtagatctggccgctggggaggtgccaccaggcccccgggcccaaggcgcagcacgcgcccggctccgggggggtcttcgcggggaccagatacgcgccatccagctcgccgaccactggctcctccgcgagctgttcggtggttgggtcgggggtttcctccgggggggtggccgcccgtatgcgtgcgaacgtgagggtgcacaggagcggggtcagggggtgcgtcacgctccggaggtggacgatcgcgcagtagcggcgctcgcggttaaagaaaaagagggcaaagaaggtgttcgggggcaaccgcagcgccttggggcgcgtcagatacagaaaaatctcgcagaagagggcgcgcccggggtctgggttaggaagggccacctgacacagaggctcggtgaggaccgttagacaccgaaagatcttgagccgctcgtccgcccgaacgacgcgccacacaaagacggagttgacaatgcgcgcgatagagtcgacgtccgtccccaggtcgtcgactctatcgcgcgtgccgcgagctccggcccgggaatccggccggggcaaggtccccgggggaccaggcggcgccaggggccgccggggtcccagctgcgccatgccgggggcggggggagggcaaaccccagaggcgggggccaacggcgcggggaggagtgggtgggcgaggtggccgggggaaggcgcccgctagcgagaccggccgttcccggacgacaccttgcgacaaaacctaaggacagcggcccgcgcgacggggtccgagaggctaaggtaggccgcgatgttaatggtgaacgcaaagccgccgggaaagacaactatgccacagaggcggcgattaaaccccaggcagaggtaggcgtagctttccccgggcaggtattgctcgcagaccctgcgtggggctgtggaggggacggcctccatgaagcgacatttactctgctcgcgtttactgacgtcaccatccatcgccacggcgattggacgattgttaagccgcagcgtgtctccgcttgtgctgtagtagtcaaaaacgtaatggccgtcggagtcggcaaagcgggccgggaggtcgtcgccgagcgggacgacccgccgcccccgaccgccccgtccccccaggtgtgccaggacggccagggcatacgcggtgtgaaaaaaggcgtcgggggcggtcccctcgacggcgcgcatcaggttctcgaggagaatggggaagcgcctggtcacctcccccaaccacgcgcgttggtcggggccaaagtcatagcgcaggcgctgtgagattcgcgggccgccctgaagcgcggcccggatggcctggcccagggcccggaggcacgccagatgtatgcgcgcggtaaaggcgacctcggcggcgatgtcaaagggcggcaggacggggcgcgggtggcgcaggggcacctcgagcgcgggaaagcgtagcagcagctccgcctgcccagcgggagacagctggtgggggcgcacgacgcgttctgcggcgcaggcctcggtcagggccgtggccagcgccgaggacagcagcggagggcgggcgcgtcgcccgccccacgccacggagttctcgtaggagacgacgacgaagcgctgcttggttccgtagtggtggcgcaggaccacggagatagaacgacggctccacagccagtccggccggtcgccgccggccagggcttcccatccgcgatccaaccactcgaccagcgaccgcggctttgcggtaccaggggtaagggttagaacgtcgttcaggatgtcctcgcccccgggcccgtggggcgctggggccacaaagcggcccccgccggggggctccagacccgccagcaccgcatctgcgtcagccgcccccatggcgcccccgctgacggcctggtgaaccagggcgccctggcgtagccccgatgcaacgccacaggccgcacgcccggtccgcgctcggaccgggtggcggcgggtgacgtcctgcactgcccgctgaaccaacgcgaggatctcctcgttctcctgtgcgatggacacgtcctgggccgcggtcgtgtcgccgccgggggccgtcagctgctcctccggggagatgggggggtcggacgccccgacgatgggcgggtctgcgggcgcccccgcgtggggccgggccaagggctgcggacgcggggacgcgctttcccccagacccatggacaggtgggccgcagcctccttcgcggccggcggggcggcggcgccaagcagagcgacgtagcggcacaaatgccgacagacgcgcatgatgcgcgtgctgtcggccgcgtagcgcgtgttgggggggacgagctcgtcgtaactaaacagaatcacgcgggcacagctcgcccccgagccccacgcaaggcgcagcgccgccacggcgtacgggtcatagacgccctgcgcgtcacacaccacgggcagggagacgaacaaccccccggcgctggacgcacgcggaaggaggccagggtgtgccggcacgacgggggccagaagctcccccaccgcatccgcgggcacgtaggcggcaaacgccgtgcaccacggggtacagtcgccggtggcatgagcccgagtctggatttcgacctggaagtttgcggccgtcccgagtccggggcggccgcgcatcagggcggccagagggattcccgcggccgccaggcactcgctggatatgatgacgtgaaccaaagaccgagggccgacccgggccgtggccgagatcgtctggacctcgttggccaagtgcgcgttcatggttcgggggtgggtgtgggtgtgtaggcgatgcgggtcccccgagtccgcgggaagggcgtgggtttggcgcgcgtatgcgtattcgccaacggaggcgtgcgtgcttatgcgcggcgcgtttcttctgtctctagggaatccgaggccaggactttaacctgctctttgtcgacgaggccaactttattcgcccggatgcggtccagacgattatgggctttctcaaccaggccaactgcaagattatcttcgtgtcgtccaccaacaccgggaaggccagtacgagctttttgtacaacctccgcggggccgcagacgagcttctcaacgtggtgacctatatatgcgatgatcacatgccgagggtggtgacgcacacaaacgccacggcctgttcttgttatatcctcaacaagcccgttttcatcacgatggacggggcggttcgccggaccgccgatttgtttctggccgattccttcatgcaggagatcatcgggggccaggccagggagaccggcgacgaccggcccgttctgaccaagtctgcgggggagcggtttctgttgtaccgcccctcgaccaccaccaacagcggcctcatggcccccgatttgtacgtgtacgtggatcccgcgttcacggccaacacccgagcctccgggaccggcgtcgctgtcgtcgggcggtaccgcgacgattatatcatcttcgccctggagcacttttttctccgcgcgctcacgggctcggcccccgccgacatcgcccgctgcgtcgtccacagtctgacgcaggtcctggccctgcatcccggggcgtttcgcggcgtccgggtggcggtcgagggaaatagcagccaggactcggccgtcgccatcgccacgcacgtgcacacagagatgcaccgcctactggcctcggagggggccgacgcgggctcgggccccgagcttctcttctaccactgcgagcctcccgggagcgcggtgctgtacccctttttcctgctcaacaaacagaagacgcccgcctttgaacactttattaaaaagtttaactccgggggcgtcatggcctcccaggagatcgtttccgcgacggtgcgcctgcagaccgacccggtcgagtatctgctcgagcagctaaataacctcaccgaaaccgtctcccccaacactgacgtccgtacgtattccggaaaacggaacggcgcctcggatgaccttatggtcgccgtcattatggccatctacctcgcggcccaggccggacctccgcacacattcgctcctatcacacgcgtctcgtgagcgcccaataaacacacccaggtatgctacgcacgaccacggtgtcgtctgttaaggggggggggggaagggggtgttggcgggaagcgtgggaacacgggggattctctcacgaccggcaccagtaccacccccctgtgaacacagaaaccccaacccaaatcccataaacatacgacacacaggcatattttggaatttcttaggtttttatttatttaggtatgctggggtttctccctggatgcccacccccacccccccgtgggtctagccgggccttagggatagcgtataacgggggccatgtctccggaccgcacaacggccgcgccgtcaaaggtgcacacccgaaccacgggagccagggccaaggtgtctcctagttggcccgcgtgggtcagccaggcgacgagcgcctcgtaaagcggcagccttcgctctccatcctgcatcagggccggggcttcggggtgaatgagctgggcggcctcccgcgtgacactctgcatctgcagtagagcgttcacgtacccgtcctgggcacttagcgcaaagagccgggggattagcgtaaggatgatggtggttccctccgtgatcgagtaaaccatgttaaggaccagcgatcgcagctcggcgtttacgggaccgagttgttggacgtccgccagcagcgagaggcgactcccgttgtagtacagcacgttgaggtctggcagccctccggggtttctggggctggggttcaggtcccggatgcccctggccacgagccgcgccacgatttcgcgcgccaggggcgatggaagcggaacgggaaaccgcaacgtgaggtccagcgaatccaggcgcacgtccgtcgcttggccctcgaacacgggcgggacgaggctgatggggtccccgttacagagatctacgggggaggtgttgcgaaggttaacggtgccggcgtgggtgaggcccacgtccagggggcaggcgacgattcgcgtgggaagcacccgggtgatgaccgcggggaagcgccttcggtacgccagcaacaaccccaacgtgtcgggactgacgcctccggagacgaaggattcgtgcgccacgtcggccagcgtcagttgccggcggatggtcggcaggaataccacccgcccttcgcagcgctgcagcgccgccgcatcggggcgcgagatgcccgagggtatcgcgatgtcagtttcaaagccgtccgccagcatggcgccgatccacgcggcagggagtgcagtggtggttcgggtggcgggaggagcgcggtgggggtcagcggcgtagcagagacgggcgaccaacctcgcataggacggggggtgggtcttagggggttgggaggcgacagggaccccagagcatgcgcggggaggtctgtcgggcccagacgcaccgagagcgaatccgtccgcggagtcccggcttgggttttatggggcccggccctcggaatcgcggcttgtcggcggggacaaagggggcggggctaggggcttgcggaaacagaagacgcgtgggataaaagaatcgcactaccccaaggaagggcggggcggtttattacagagccagtcccttgagcggggatgcgtcatagacgagatactgcgcgaagtgggtctcccgcgcgtgggcttccccgttgcgggcactgcggaggagggcggggtcgctggcgcaggtgagcgggtaggcctcctgaaacaggccacacgggtcctccacgagttcgcggcaccccggggggcgcttaaactgtacgtcgctggcggcggtggccgtggacaccgccgaacccgtctccacgatcaggcgctccaggcagcgatgtttggcggcgatgtcggccgacgtaaagaacttaaagcaggggctgagcaccggcgaggccccgttgaggtggtaggccccgttatagagcaggtccccgtacgaaaatcgctgcgacgcccacgggttggccgtggccgcgaaggcccgggacgggtcgctctggccgtggtcgtacatgagggcggtgacatccccctccttgtcccccgcgtaaacgcccccggcggcgcgtccccgggggttgcagggccggcggaagtagttgacgtcggtcgacacgggggtggcgataaactcacacacggcgtcctggccgtggtccatccctgcgcgccgcggcacctgggcgcacccgaacacggggacgggctgggccggccccaggcggtttcccgccacgaccgcgttccgcaggtacacggctgccgcgttgtccaggagagggggagccccgcggcccaggtaaaagttttggggaaggttgcccatgtcggtgacggggttgcggacggttgccgtggccacgacggcggtgtagcccacgcccaggtccacgttcgcgcgcggctgggtgagcgtgaagtttacccccccgccagtttcgtgccgggccacctggagctggcccaggaagtacgcctccgacgcgcgctccgagaacagcacgttctcagtcacaaagcggtcctgtcggacgacggtgaacccaaacccgggatggaggcccgtcttgagctgatgatgcaaggccacgggactgatcttgaagtaccccgccatgagcgcgtaggtcagcgcgttctccccggccgcgctctcgcggacgtgctgcacgacgggctgtcggatcgacgaaaagtagttggcccccagagccggggggaccagggggacctgccgcgacaggtcgcgcagggccggggggaaattgggcgcgttcgccacgtggtcggccccggcgaacagcgcgtggacggggagggggtaaaaatagtcgccattttggatggtatggtccagatgctggggggccatcagcaggattccggcgtgcaacgccccgtcgaatatgcgcatgttggtggtggacgcggtgttggcgcccgcgtcgggcgccgccgagcagagcagcgccgttgtgcgttcggccatgttgtgggccagcacctgcagcgtgagcatggcgggcccgtccactaccacgcgcccgttgtgaaacatggcgttgaccgtgttggccaccagattggccgggtgcagggggtgcgcggggtccgtcacggggtcgctggggcactcctcgccgggggcgatctccgggaccaccatgttctgcagggtggcgtatacgcggtcgaagcgaacccccgcggtgcagcagcggccccgcgagaaggcgggcaccatcacgtagtagtaaatcttgtggtgcacggtccagtccgccccccggtgcggccggtcatccgcggcgtccgcggctcgggcctgggtgttgtgcagcagctggccgtcgttgcggttgaagtccgcggtcgccacgttacatgccgccgcgtacacggggtcgtggccccccgcgctaacccggcagtcgcgatggcggtccagggccgcgcgccgcatcagggcgtcacagtcccacacgaggggtggcagcagcgccgggtctcgcattaggtgattcagctcggcttgcgcctgcccgcccagctccgggccggtcagggtaaagtcatcaaccagctgggccagggcctcgacgtgcgccaccaggtcccggtacacggccatgcactcctcgggaaggtctcccccgaggtaggtcacgacgtacgagaccagcgagtagtcgttcacgaacgccgcgcaccgcgtgttgttccagtagctggtgatgcactggaccacgagccgggccagggcgcagaagacgtgctcgctgccgtgtatggcggcctgcagcaggtaaaacaccgccgggtagttgcggtcgtcgaacgccccgcgaacggcggcgatggtggcgggggccatggcgtggcgtcccacccccagctccaggccccgggcgtcccggaacgccgccggacatagcgccaggggcaagttgccgttcaccacgcgccaggtggcctggatctcccccgggccggccgggggaacgtccccccccggcagctccacgtcggccacccccacaaagaagtcgaacgcggggtgcagctcaagagccaggttggcgttgtcgggctgcataaactgctccggggtcatctggccttccgcgacccatcggacccgcccgtgggccaggcgctgcccccaggcgttcaaaaacagctgctgcatgtctgcggcggggccggccggggccgccacgtacgccccgtacggattggcggcttcgacggggtcgcggttaaggcccccgaccgccgcgtcaacgttcatcagcgaagggtggcacacggtcccgatcgcgtgttccagagacaggcgcagcacctggcggtccttcccccaaaaaaacagctggcggggcgggaaggcgcggggatccgggtggccgggggcggggactaggtccccggcgtgcgcggcaaaccgttccatgaccggattgaacaggcccaggggcaggacgaacgtcaggtccatggcgcccaccagggggtagggaacgttggtggcggcgtagatgcgcttctccagggcctccagaaagaccagcttctcgccgatggacaccagatccgcgcgcacgcgcgtcgtctggggggcgctctcgagctcgtccagcgtctgccggttcaggtcgagctgctcctcctgcatctccagcaggtggcggcccacgtcgtccagacttcgcacggccttgcccatcacgagcgccgtgaccaggttggccccgttcaggaccatctcgccgtacgtcaccggcacgtcggcttcggtgtcctccactttcaggaaggactgcaggaggcgctgtttgatcggggcggtggtgacgagcaccccgtcgaccggccgcccgcgcgtgtcggcatgcgtcagacggggcacggccacggagggctgcgtggccgtggtgaggtccacgagccaggcctcgacggcctcccggcggtggcccgccttgcccaggaaaaagctcgtctcgcagaagcttcgctttagctcggcgaccagggtcgcccgggccaccctggtggccaggcggccgttgtccaggtatcgttgcatcggcaacaacaaagccaggggcggcgccttttccagcagcacgtgcagcatctggtcggccgtgccgcgctcaaacgccccgaggacggcctggacgttgcgagcgagctgttggatggcgcgcaactggcgatgcgcgccgatacccgtcccgtccagggcctcccccgtgagcagggcgatggcctcggtggccaggctgaaggcggcgttcagggcccggcggtcgataatcttggtcatgtaattgtgtgtgggttgctcgatggggtgcgggccgtcgcgggcaatcagcggctggtggacctcgaactgtacgcgcccctcgttcatgtaggccagctccggaaacttggtacacacgcacgccaccgacaacccgagctccagaaagcgcacgagcgacagggtgttgcaatacgaccccagcagggcgtcgaactcgacgtcgtacaggctgtttgcatcggagcgcacgcgggaaaaaaaatcaaacaggcgtcgatgcgacgccacctcgatcgtgctaaggagggacccggtcggcaccatggccgcggcataccggtatcccggagggtcgcggttgggagcggccatggggtcgcgtggagatcggctgtctctagcgatattggcccggggaggctaagatccaccccaacgcccggccacccgtgtacgtgcccgacggcccaaggtccaccgaaagacacgacgggcccggacccaaaaaggcgggggatgctgtgtgagaggccgggtgccggtcgggggggaaaggcaccgggagaaggctgcggcctcgttccaggagaacccagtgtccccaacagacccggggacgtgggatcccaggccttatatacccccccccccgccccacccccgttagaacgcgacgggtgcattcaagatggccctggtccaaaagcgtgccaggaagaaattggcagaggcggcaaagctgtccgccgccgccacccacatcgaggccccggccgcgcaggctatccccagggcccgtgtgcgcaggggatcggtgggcggcagcatttggttggtggcgataaagtggaaaagcccgtccggactgaaggtctcgtgggcggcggcgaacaaggcacacagggccgtgcctcccaaaaacacggacatcccccaaaacacgggcgccgacaacggcagacgatccctcttgatgttaacgtacaggaggagcgcccgcaccgcccacgtaacgtagtagccgacgatggcggccaggatacaggccggcgccaccacccttccggtcagcccgtaatacatgcccgctgccaccatctccaacggcttcaggaccaaaaacgaccaaaggaacagaatcacgcgctttgaaaagaccggctgggtatggggcggaagacgcgagtatgccgaactgacaaaaaaatcagaggtgccgtacgaggacaatgaaaactgttcctccagcggcagttctccctcctcccccccgaaggcggcctcgtcgaccagatctcgatccaccagaggaaggtcatcccgcatggtcatggggtgtgcggtggaggtggggagaccgaaaccgcaaagggtcgcttacgtcagcaggatcccgagatcaaagacacccgggttcttgcacaaacaccacccgggttgcatccgcggaggcgagtgttttgataaggccgttccgcgccttgatataacctttgatgttgaccacaaaacccggaatttacgcctacgccccaatgcccacgcaagatgaggtaggtaacccccccgtgggtgtgacgttgcgtttagttcattggaggccaaggggaaaaatggggtggggaggaaacggaaaacccagtaggccgtgtcgggaacacgcccggggttgtcctcaaaaggcagggtccatactacggaagccgtcgttgtattcgagacctgcctgtgcaacgcacgtcggggttgcctgtgtccggttcggcccccaccgcgtgcggcacgcacgaggacgagtccgcgtgctttattggcgttccaagcgttgccctccagtttctgttgtcggtgttcccccatacccacgcccacatccaccgtagggggcctctgggccgtgttacgtcgccgcccgcgatggagcttagctacgccaccaccatgcactaccgggacgttgtgttttacgtcacaacggaccgaaaccgggcctactttgtgtgcggggggtgtgtttattccgtggggcggccgtgtgcctcgcagcccggggagattgccaagtttggtctggtcgttcgagggacaggcccagacgaccgcgtggtcgccaactatgtacgaagcgagctccgacaacgcggcctgcaggacgtgcgtcccattggggaggacgaggtgtttctggacagcgtgtgtcttctaaacccgaacgtgagctccgagctggatgtgattaacacgaacgacgtggaagtgctggacgaatgtctggccgagtactgcacctcgctgcgaaccagcccgggtgtgctaatatccgggctgcgcgtgcgggcgcaggacagaatcatcgagttgtttgaacacccaacgatagtcaacgtttcctcgcactttgtgtataccccgtccccatacgtgttcgccctggcccaggcgcacctcccccggctcccgagctcgctggaggccctggtgagcggcctgtttgacggcatccccgccccacgccagccacttgacgcccacaacccgcgcacggatgtggttatcacgggccgccgcgccccacgacccatcgccgggtcgggggcggggtcggggggcgcgggcgccaagcgggccaccgtcagcgagttcgtgcaagtcaaacacattgaccgcgtgggccccgctggcgtttcgccggcgcctccgccaaacaacaccgactcgagttccctggtgcccggggcccaggattccgccccgcccggccccacgctaagggagctgtggtgggtgttttatgccgcagaccgggcgctggaggagccccgcgccgactctggcctcacccgcgaggaggtacgtgccgtacgtgggttccgggagcaggcgtggaaactgtttggctccgcgggggccccgcgggcgtttatcggggccgcgttgggcctgagccccctccaaaagctagccgtttactactatatcatccaccgagagaggcgcctgtcccccttccccgcgctagtccggctcgtaggccggtacacacagcgccacggcctgtacgtccctcggcccgacgacccagtcttggccgatgccatcaacgggctgtttcgcgacgcgctggcggccggaaccacagccgagcagctcctcatgttcgaccttctccccccaaaggacgtgccggtgggaagcgacgtgcaggccgacagcaccgctctgctgcgctttatagaatcgcaacgtctcgccgtccccgggggggtgatctcccccgagcacgtcgcgtaccttggtgcgttcctgagcgtgctgtacgctggccgcgggcgcatgtccgcagccacgcacaccgcgcggctgacaggggtgacctccctggtgctagcggtgggtgacgtggaccgtctttccgcgtttgaccgcggagcggcgggcgcggccagccgcacgcgggccgccgggtacctggatgtgcttcttaccgttcgtctcgctcgctcccaacacggacagtctgtgtaaaagaccccaataaacgtatatcgctactacacccttgtgtgtcaatggacgcctctccgggggggggggagggaaagcaaagaggggctgggggagcggcaccaccggggcctgaacaaacaaaccacagacacggttacagtttattcggtcgggcggagaaacggccgaagccacgcccactttattcgcgtctccaaaaaaacgggacacttgtccggagaacctttaggatgccagccagggcggcggtaatcataaccacgcccagcgcagaggcggccagaaacccgggcgcaattgcggccacgggctgcgtgtcaaaggctagcaaatgaatgacggttccgtttggaaatagcaacaaggccgtggacggcacgtcgctcgaaaacacgcttggggcgccctccgtcggcccggcggcgatttgctgctgtgtgttgtccgtatccaccagcaacacagacatgacctccccggccggggtgtagcgcataaacacggcccccacgagccccaggtcgcgctggttttgggtgcgcaccagccgcttggactcgatatcccgggtggagccttcgcatgtcgcggtgaggtaggttaggaacagtgggcgtcggacgtcgacgccggtgagcttgtagccgatcccccggggcagaggggagtgggtgacgacgtagctggcgttgtgggtgatgggtaccaggatccgtggctcgacgttggcagactgccccccgcaccgatgtgaggcctcagggacgaaggcgcggatcagggcgttgtagtgtgcccaacgcgtcagggtcgaggcgaggccgtgggtctgctgggccaggacttcgaccggggtctcggatcgggtggcttgagccagcgcgtccaggataaacacgctctcgtctagatcaaagcgcagggaggccgcgcatggcgaaaagtggtccggaagccaaaagagggttttctggtggtcggcccgggccagcgcggtccggaggtcggcgttggtcgctgcggcgacgtcggacgtacacagggccgaggctatcagaaggctccggcgggcgcgttcccgctgcaccgccgaggggacgccagccaagaacggctgccggaggacagccgaggcgtaaaatagcgcccggtggacgaccggggtggtcagcacgcggccccctagaaactcggcatacagggcgtcgatgagatgggctgcgctgggcgccactgcgtcgtacgccgaggggctatccagcacgaaggccagctgatagcccagcgcgtgtaatgccaagctctgttcgcgctccagaatctcggccaccaggtgctggagccgagcctctagctgcaggcgggccgtgggatccaagactgacacattaaaaaacacagaatccgcggcacagcccgcggccccgcgggcggccaacccggcaagcgcgcgcgagtgggccaaaaagcctagcaggtcggagaggcagaccgcgccgtttgcgtgggcggcgttcacgaaagcaaaacccgacgtcgcgagcagccccgttaggcgccagaagagaggggggcgcgggccctgctcggcgcccgcgtcccccgagaaaaactccgcgtatgcccgcgacaggaactgggcgtagttcgtgccctcctccgggtagccgcccacgcggcggagggcgtccagcgcggagccgttgtcggcccgcgtcagggaccctaggacaaagacccgataccgggggccgcccgggggcccgggaagagcccccggggggttttcgtccgcggggtccccgacccgatctagcgtctggcccgcggggaccaccatcacttccaccggagggctgtcgtgcatggatatcacgagccccatgaattcccgcccgtagcgcgcgcgcaccagcgcggcatcgcacccgagcaccagctcccccgtcgtccagatgcccacgggccacgtcgaggccgacggggagaaatacacgtacctacctggggatctcaacaggccccgggtggccaaccaggtcgtggacgcgttgtgcaggtgcgtgatgtccagctccgtcgtcgggtgccgccgggccccaaccggcggtcgggggggcggtgtatcacgcggcccgctcgggtggctcgccgtcgccacgttgtctccccgcgggaacgtcagggcctcggggtcagggacggccgaaaacgttacccaggcccgggaacgcagcaacacggaggcggctggattgtgcaagagacccttaaggggggcgaccgaggggggaggctgggcggtcggctcgaccgtggtgggggcgggcaggctcgcgttcgggggccggccgagcaggtaggtcttcgggatgtaaagcagctggccggggtcccgcggaaactcggccgtggtgaccaatacaaaacaaaagcgctcctcgtaccagcgaagaaggggcagagatgccgtagtcaggtttagttcgtccggcggcgccagaaatccgcgcggtggtttttgggggtcgggggtgtttggcagccacagacgcccggtgttcgtgtcgcgccagtacatgcggtccatgcccaggccatccaaaaaccatgggtctgtctgctcagtccagtcgtggacctgaccccacgcaacgcccaaaataataacccccacgaaccataaaccattccccatgggggaccccgtccctaacccacggggcccgtggctatggcagggcttgccgccccgacgttggctgcgagccctgggccttcacccgaacttgggggttggggtggggaaaaggaagaaacgcgggcgtattggtcccaatggggtctcggtggggtatcgacagagtgccagccctgggaccgaaccccgcgtttatgaacaaacgacccaacacccgtgcgttttattctgtctttttattgccgtcatagcgcgggttccttccggtattgtctccttccgtgtttcagttagcctcccccatctcccgggcaaacgtgcgcgccaggtcgcagatcgtcggtatggagcctggggtggtgacgtgggtctggaccatcccggaggtaagttgcagcagggcgtcccggcagccggcgggcgattggtcgtaatccaggataaagacatgcatgggacggaggcgtttggccaagacgtccaaagcccaggcaaacacgttatacaggtcgccgttgggggccagcaactcgggggcccgaaacagggtaaataacgtgtccccgatatggggtcgtgggcccgcgttgctctggggctcggcaccctggggcggcacggccgcccccgaaagctgtccccaatcctcccgccacgacccgccgccctgcagataccgcaccgtattggcaagcagcccataaacgcggcgaatcgcggccagcatagccaggtcaagccgctcgccggggcgctggcgtttggccaggcggtcgatgtgtctgtcctccggaagggcccccaacacgatgtttgtgccgggcaaggtcggcgggatgagggccacgaacgccagcacggcctggggggtcatgctgcccataaggtatcgcgcggccgggtagcacaggagggcggcgatgggatggcggtcgaagatgagggtgagggccgggggcggggcatgtgagctcccagcctcccccccgatatgaggagccagaacggcgtcggtcacggcataaggcatgcccattgttatctgggcgcttgtcattaccaccgccgcgtccccggccgatatctcaccctggtcgaggcggtgttgtgtggtgtagatgttcgcgattgtctcggaagcccccaacacccgccagtaagtcatcggctcgggtacgtagacgatatcgtcgcgcgaacccagggccaccagcagttgcgtggtggtggttttccccatcccgtggggaccgtctatataaacccgcagtagcgtgggcattttctgctccaggcggacttccgtggctttttgttgccggcgagggcgcaacgccgtacgtcggttgttatggccgcgagaacgcgcagcctggtcgaacgcagacgcgtgttgatggcaggggtacgaagccatacgcgcttctacaaggcgctggccgaagaggtgcgggagtttcacgccaccaagatctgcggcacgctgttgacgctgttaagcgggtcgctgcagggtcgctcggtattcgaggccacacgcgtcaccttaatatgcgaagtggacctgggaccgcgccgccccgactgcatctgcgtgttcgaattcgccaatgacaagacgctgggcggggtttgtgtcatcatagaactaaagacatgcaaatatatttcttccggggacaccgccagcaaacgcgagcaacgggccacggggatgaagcagctgcgccactccctgaagctcctgcagtccctcgcgcctccgggtgacaagatagtgtacctgtgccccgtcctggtgtttgtcgcccaacggacgctccgcgtcagccgcgtgacccggctcgtcccgcagaaggtctccggtaatatcaccgcagtcgtgcggatgctccagagcctgtccacgtatacggtccccattgagcctaggacccagcgagcccgtcgccgccgcggcggcgccgcccgggggtctgcgagcagaccgaaaaggtcacactctggggcgcgcgacccgcccgagtcagcggcccgccagttaccacccgccgaccaaacccccacctccacggagggcgggggggtgcttaagaggatcgcggcgctcttctgcgtgcccgtggccaccaagaccaaaccccgagccgcctccgaatgagagtgtttcgttccttccccctccccccgcgtcagacaaaccctaaccaccgcttaagcggcccccgcgaggtccgaagactcatttggatccggcgggagccacccgacaacagcccccgggttttcccacgccagacgccggtccgctgtgccatcgcgccccctcatcccaccccccatcttgtccccaaataaaacaaggtctggtagttaggacaacgaccgcagttctcgtgtgttattttcgctctccgcctctcgcagatggacccgtactgcccatttgacgctctggacgtctgggaacacaggcgcttcatagtcgccgattcccgaaacttcatcacccccgagttcccccgggacttttggatgtcgcccgtctttaacctcccccgggagacggcggcggagcaggtggtcgtcctacaggcccagcgcacagcggctgccgctgccctggagaacgccgccatgcaggcggccgagctccccgtcgatatcgagcgccggttacgcccgatcgaacggaacgtgcacgagatcgcaggcgccctggaggcgctggagacggcggcggccgccgccgaagaggcggatgccgcgcgcggggatgagccggcgggtgggggcgacgggggggcgcccccgggtctggccgtcgcggagatggaggtccagatcgtgcgcaacgacccgccgctacgatacgacaccaacctccccgtggatctgctacacatggtgtacgcgggccgcggggcgaccggctcgtcgggggtggtgttcgggacctggtaccgcactatccaggaccgcaccatcacggactttcccctgaccacccgcagtgccgactttcgggacggccgtatgtccaagaccttcatgacggcgctggtactgtccctgcaggcgtgcggccggctgtatgtgggccagcgccactattccgccttcgagtgcgccgtgttgtgtctctacctgctgtaccgaaacacgcacggggccgccgacgatagcgaccgcgctccggtcacgttcggggatctgctgggccggctgccccgctacctggcgtgcctggccgcggtgatcgggaccgagggcggccggccacagtaccgctaccgcgacgacaagctccccaagacgcagttcgcggccggcgggggccgctacgaacacggagcgctggcgtcgcacatcgtgatcgccacgctgatgcaccacggggtgctcccggcggccccgggggacgtcccccgggacgcgagtacccacgttaaccccgacggcgtggcgcaccacgacgacataaaccgcgccgccgccgcgttcctcagccggggccacaacctattcctgtgggaggaccagactctgctgcgggcaaccgcgaacaccataacggccctgggcgttatccagcggctcctcgcgaacggcaacgtgtacgcggaccgcctcaacaaccgcctgcagctgggcatgctgatccccggagccgtcccttcggaggccatcgcccgtggggcctccgggtccgactcgggggccatcaagagcggagacaacaatctggaggcgctatgtgccaattacgtgcttccgctgtaccgggccgacccggcggtcgagctgacccagctgtttcccggcctggccgccctgtgtcttgacgcccaggcggggcggccggtcgggtcgacgcggcgggtggtggatatgtcatcgggggcccgccaggcggcgctggtgcgcctcaccgccctggaactcatcaaccgcacccgcacaaaccccacccctgtgggggaggttatccacgcccacgacgccctggcgatccaatacgaacaggggcttggcctgctggcgcagcaggcacgcattggcttgggctccaacaccaagcgtttctccgcgttcaacgttagcagcgactacgacatgttgtactttttatgtctggggttcattccacagtacctgtcggcggtttagtgggtggtgggcgaggggggagggggcattagggagaaaaaacaagagcctccgttgggttttctttgtgcctgtactcaaaaggtcataccccgtaaacggcgggctccagtcccggcccggcggttggcgtgaacgcaacggcgggagctgggttagcgtttagtttagcattcgctctcgcctttccgcccgccccccgaccgttgcgcctttttttttttcgtccaccaaagtctctgtgggtgcgcgcatggcagccgatgccccgggagaccggatggaggagcccctgcccgacagggccgtgcccatttacgtggctgggtttttggccctgtatgacagcggggactcgggcgagttggcattggatccggatacggtgcgggcggccctgcctccggataacccactcccgattaacgtggaccaccgcgctggctgcgaggtggggcgggtgctggccgtggtcgacgacccccgcgggccgttttttgtggggctgatcgcctgcgtgcagctggagcgcgtcctcgagacggccgccagcgctgcgattttcgagcgccgcgggccgccgctctcccgggaggagcgcctgttgtacctgatcaccaactacctgccctcggtctccctggccacaaaacgcctggggggcgaggcgcaccccgatcgcacgctgttcgcgcacgtcgcgctgtgcgcgatcgggcggcgcctcggcactatcgtcacctacgacaccggtctcgacgccgccatcgcgccctttcgccacctgtcgccggcgtctcgcgagggggcgcggcgactggccgccgaggccgagctcgcgctgtccgggcgcacctgggcgcccggcgtggaggcgctgacccacacgctgctttccaccgccgttaacaacatgatgctgcgggaccgctggagcctggtggccgagcggcggcggcaggccgggatcgccggacacacctacctccaggcgagcgaaaaattcaaaatgtggggggcggagcctgtttccgcgccggcgcgcgggtataagaacggggccccggagtccacggacataccgcccggctcgatcgctgccgcgccgcagggtgaccggtgcccaatcgtccgtcagcgcggggtcgccttgtccccggtactgccccccatgaaccccgttccgacatcgggcaccccggcccccgcgccgcccggcgacgggagctacctgtggatcccggcctcccattacaaccagctcgtcgccggccatgccgcgccccaaccccagccgcattccgcgtttggtttcccggctgcggcggggtccgtggcctatgggcctcacggtgcgggtctttcccagcattaccctccccacgtcgcccatcagtatcccggggtgctgttctcgggacccagcccactcgaggcgcagatagccgcgttggtgggggccatagccgcggaccgccaggcgggcggtcagccggccgcgggagaccctggggtccgggggtcgggaaagcgtcgccggtacgaggcggggccgtcggagtcctactgcgaccaggacgaaccggacgcggactacccgtactaccccggggaggctcgaggcgcgccgcgcggggtcgactcccggcgcgcggcccgccattctcccgggaccaacgagaccatcacggcgctgatgggggcggtgacgtctctgcagcaggaactggcgcacatgcgggctcggaccagcgccccctatggaatgtacacgccggtggcgcactatcgccctcaggtgggggagccggaaccaacaacgacccacccggccctttgtcccccggaggccgtgtatcgccccccaccacacagcgccccctacggtcctccccagggtccggcgtcccatgcccccactcccccgtatgccccagctgcctgcccgccaggcccgccaccgcccccatgtccttccacccagacgcgcgcccctctaccgacggagcccgcgttcccccccgccgccaccggatcccaaccggaggcatccaacgcggaggccggggcccttgtcaacgccagcagcgcagcacacgtggacgttgacacggcccgcgccgccgatttgttcgtctctcagatgatgggggcccgctgattcgccccggtctttggtaccatgggatgtcttactgtatatctttttaaataaaccaggtaataccaaataagacccattggtgtatgttctttttttattgggaggcgcgggtaggcgggtagctttacaatgcaaaagccttcgacgtggaggaaggcgtggggggggggggaatcggcactgaccaagggggtccgttttgtcacgggaaaggaaagaggaaacaggccgcggacacccgggggagtttgtgttcccttttctttcttcccacacacacaaaaggcgtaccaaacaaacaaaccaaaagatgcacatgcggtttaacacccgtggtttttatttacaacaaaccccccatcacaggtcgtcctcgtcggcgtcaccgtctttgttgggaacttgggtgtagttggtgttgcggcgcttgcgcatgaccatgtcggtgaccttggcgctgagcagcgcgctcgtgcccttcttcttggccttgtgttccgtgcgctccatggcagacaccagggccatgtaccgtatcatctcccgggcctcggctagcttggcctcgtcaaagtcgccgccctcctcgccctccccggacgcgtccgggttggtggggttcttgagctccttggtggttagcgggtacagggccttcatggggttgctctgcagccgcatgacgtagcgaaaggcgaagaaggccgccgccaggccggccaggaccaacagacccacggccagcgccccaaaggggttggacatgaaggaggacacgcccgacacggccgataccacgccgcccacgatgcccatcaccaccttgccgaccgcgcgccccaggtcgcccatcccctcgaagaacgcgcccaggcccgcaaacatggcggcgttggcgtcggcgtggatgaccgtgtcgatgtcggcgaagcgcaggtcgtgcagctggttgcggcgctggacctccgtgtagtccagcaggccgctgtccttgatctcgtggcgggtgtacacctccagggggacaaactcgtgatcctccagcatggtgatgttgaggtcgatgaaggtgctgacggtggtgatgtcggcgcggctcagctggtgggagtacgcgtactcctcgaagtacacgtagcccccaccgaaggtgaagtagcgccggtgtcccacggtgcacggctcgatcgcatcgcgcgtcagccgcagctcgttgttctcccccagctgcccctcgaccaacgggccctggtcttcgtaccgaaagctgaccagggggcggctgtagcaggccccgggccgcgagctgatgcgcatcgagttttggacgatcacgttgtccgcggcgaccggcacgcacgtggagacggccatcacgtcgccgagcatccgcgcgctcacccgccggcccacggtggccgaggcgatggcgttggggttcagcttgcgggcctcgttccacagggtcagctcgtgattctgcagctcgcaccacgcgatggcaacgcggcccaacatatcgttgacatggcgctgtatgtggttgtacgtaaactgcagcctggcgaactcgatggaggaggtggtcttgatgcgctccacggacgcgttggcgctggccccgggcggcgggggcgtggggtttgggggcttgcggctctgctcgcggaggtgttcccgcacgtacagctccgcgagcgtgttgctgagaaggggctggtacgcgatcagaaagcccccattggccaggtagtactgcggctggcccaccttgatgtgcgtcgcgttgtacctgcgggcgaagatgcggtccatggcgtcgcgggcgtccttgccgatgcagtcccccaggtccacgcgcgagagcgggtactcggtcaggttggtggtgaaggtggtggatatggcgtcggaagagaatcggaaggagccgccgtactcggagcgcagcatctcgtccacctcctgccacttggtcatggtgcagaccgacgggcgctttggcacccagtcccaggccacggtgaacttgggggtcgtgagcaggttccgggtggtcggcgccgtggcccgggccttggtggtgaggtcgcgcgcgtagaagccgtcgacctgcttgaagcggtcggcggcgtagctggtgtgttcggtgtgcgacccctcccggtagccgtaaaacggggacatgtacacaaagtcgccagtcgccaacacaaactcgtcgtacgggtacaccgagcgcgcgtccacctcctcgacgatgcagtttaccgtcgtcccgtaccggtggaacgcctccacccgcgaggggttgtacttgaggtcggtggtgtgccagccccggctcgtgcgggtcgcggcgttggccggtttcagctccatgtcggtctcgtggtcgtcccggtgaaacgcggtggtctccaggttgttgcgcacgtacttggccgtggaccgacagacccccttggcgttgatcttgtcgatcacctcctcgaaggggacgggggcgcggtcctcaaagatccccataaactgggagtagcggtggccgaaccacacctgcgaaacggtgacgtctttgtagtacatggtggccttgaacttgtacggggcgatgttctccttgaagaccaccgcgatgccctccgtgtagttctgaccctcgggccgggtcgggcagcggcgcggctgctcgaactgcaccaccgtggcgcccgtggggggtgggcacacgtaaaagtttgcatcggtgttctccgccttgatgtcccgcaggtgctcgcgcagggtggcgtggcccgcggcgacggtcgcgttgtcgccggcggggcgcggcggctttgggggtttcggttttctgttcttcttcggtttcgggtcccccgttgggggggcgccaggggcgggcggcgccggagtggcagggcccccgttcgccgcctgggtcgcggccgcgaccccaggcgtgccgggggaactcggagccgccgacgccaccaggacccccagcgtcaaccccaagagcgcccatacgacgaaccaccggcgcccccgcgcgggggcgccctggcgcatggcgggactacgggggcccgtcgtgccccccgtcaggtagcctgggggcgaggtgctggaggaccgagtagaggatcgagaaaacgtctcggtcgtagaccacgaccgaccgggggccgatacagccgtcgggggcgctctcgacgatggccaccagcggacagtcggagtcgtacgtgagatatacgccgggcgggtaacggtaacgaccttcggaggtcgggcggctgcagtccgggcggcgcaactcgagctccccgcaccggtagaccgaggcaaagagtgtggtggcgataatcagctcgcgaatatatcgccaggcggcgcgctgagtgggcgttattccggaaatgccgtcaaaacagtaaaacctctgaaattcgctgacggcccaatcagcacccgagccccccgcccccatgatgaaccgggcgagctcctccttcaggtgcggcaggagccccacgttctcgacgctgtaatacagcgcggtgttggggggctgggcgaagctgtgggtggagtgatcaaagaggggcccgttgacgagctcgaagaagcgatgggtgatgctggggagcagggccgggtccacctggtgtcgcaggagagacgctcgcatgaaccggtgcgcgtcgaacacgcccggcgccgagcggttgtcgatgaccgtgcccgcgcccgccgtcagggcgcagaagcgcgcgcgcgccgcaaagccgttggcgaccgcggcgaacgtcgcgggcagcacctcgccgtggacgctgacccgcagcatcttctcgagctccccgcgctgctcgcggacgcagcgccccaggctggccaacgaccgcttcgtcaggcggtccgcgtacagccgccgtcgctcccgcacgtccgcggccgcttgcgtggcgatgtccccccacgtctcgggcccctgccccccgggcccgcggcgacggtcttcgtcctcgcccccgcccccgggagctcccaacccccgtgccccttcctctacggcgacacggtccccgtcgtcgtcggggcccgcgccgcccttgggcgcgtccgccgcgccccccgcccccatgcgcgccagcacgcgacgcagcgcctcctcgtcgcactgttcggggctgacgaggcgccgcaagagcggcgtcgtcaggtggtggtcgtagcacgcgcggatgagcgcctcgatctgatcgtcgggtgacgtggcctgaccgccgattattagggcgtccaccatatccagcgccgccaggtggctcccgaacgcgcgatcgaaatgctccgcccgccgcccgaacagcgccagttccacggccaccgcggcggtctcctgctgcaactcgcgccgcgccagcgcggtcaggttgctggcaaacgcgtccatggtggtctggccggcgcggtcgccggacgcgagccagaatcgcaattcgctgatggcgtacaggccgggcgtggtggcctgaaacacgtcgtgcgcctccagcagggcgtcggcctccttgcggaccgagtcgttctcgggcgacgggtggggctgcccgtcgccccccgcggtccgggccagcgcatggtccaacacggagagcgcccgcgcgcggtcggcgtccgacagcccggcggcgtggggcaggtaccgccgcagctcgttggcgtccagccgcacctgcgcctgctgggtgacgtggttacagatacggtccgccaggcggcgggcgatcgtcgccccctggttcgccgtcacacacagttcctcgaaacagaccgcgcaggggtgggacgggtcgctaagctccggggggacgataaggcccgaccccaccgcccccaccataaactcccgaacgcgctccagcgcggcggtggcgccgcgcgagggggtgatgaggtggcagtagtttagctgctttagaaagttctcgacgtcgtgcaggaaacacagctccatatggacggtcccgccatacgtatccagcctgacccgttggtgatacggacagggtcgggccaggcccatggtctccgtgaaaaacgccgcgacgtctcccgcggtcgcgaacgtctccaggctgcccaggagccgctcgccctcgcgccacgcgtactctagcagcaactccagggtgaccgacagcggggtgagaaaggccccggcctgggcctccaggcccggcctcagacgacgccgcagcgcccgcacctgaagcgcgttcagcttcagttgggggagcttcccccgtccgatgtgggggtcgcaccgccggagcagctctatctgaaacacataggtctgcacctgcccgagcagggctaacaacttttgacgggccacggtgggctcggacaccggggcggccatctcgcggcgccgatctgtaccgcggccggagtatgcggtggaccgaggcggtccgtacgctacccggcgtctggctgagccccggggtccccctcttcggggcggcctcccgcgggcccgccgaccggcaagccgggagtcggcggcgcgtgcgtttctgctctattcccagacaccgcggagaggaatcacggcccgcccagagatatagacacggaacacaaacaagcacggatgtcgtagcaataatttattttacacacattccccgccccgccctaggttcccccaccccccaacccctcacagcatatccaacgtcaggtctccctttttgtcggggggcccctccccaaacgggtcatccccgtggaacgcccgtttgcggccggcaaatgccggtcccggggcccccgggccgccgaacggcgtcgcgttgtcgtcctcgcagccaaaatccccaaagttaaacacctccccggcgttgccgagttggctgactagggcctcggcctcgtgcgccacctccagggccgcgtccgtcgaccactcgccgttgccgcgctccagggcacgcgcggtcagctccatcatctcctcgcttaggtactcgtcctccaggagcgccagccagtcctcgatctgcagctgctgggtgcggggccccaggcttttcacggtcgccacgaacacgctactggcgacggccgccccgccctcggagataatgccccggagctgctcgcacagcgagctttcgtgcgctccgccgccgaggcttgaggccgcgcacacaaacccggcccggggacaggccaggacgaacttgcgggtgcggtcaaaaataaggagcgggcacgcgtttttgccgcccatcaggctggcccagttcccggcctgaaacacacggtcgttgccggccatgccgtagtacttgctgatgctcaaccccaacacgaccatggggcgcgccgccatgacgggccgcagcaggttgcagctggcgaacatggacgtccacgcgcccggatgcgcgtccacggcgtccatcagcgcgcgggccccggcctccaggcccgccccgccctgcgcggaccacgcggccgcagcctgcacgctggggggacggcgggaccccgcgatgatggccgtaagggtgttgatgaagtatgtcgagtgatcgcagtaccgcagaatctggtttgccatgtagtacatcgccagctcgctcacgttgttgggggccaggttaataaagtttatcgcgccgtagtccagggaaaactttttaatgaacgcgatggtctcgatgtcctcgcgcgacaggagccgggcgggaagctggttgcgttggagggccgtccagaaccactgcgggttcggctggttggaccccgggggcttgccgttggggaagatggccgcgtggaactgcttcagcagaaagcccagcggtccgaggaggatgtccacgcgcttgtcgggcttctggtaggcgctctggaggctggcgacccgcgccttggcggcctcggacgcgttggcgctcgcgcccgcgaacaacacgcggctcttgacgcgcagctccttgggaaaccccagggtcacgcgggcaacgtcgccctcgaagctgctctcggcgggggccgtctggccggccgttaggctgggggcgcagatagccgccccctccgagagcgcgaccgtcagcgttttggccgacagaaacccgttgttaaacatgtccatcacgcgccgccgcagcaccggttggaattgattgcgaaagttgcgcccctcgaccgactgcccggcgaacaccccgtggcactgactcagggccaggtcctggtacacggcgaggttggatcgccgcccgagaagctgaagcagggggcacggcccgcacgcgtacgggtccagcgtcagggacatggcgtggttggcctcgcccagaccgtcgcgaaacttgaagttcctcccctccaccaggttgcgcatcagctgctccacctcgcggtccacgacctgcctgacgttgttcaccaccgtatgcagggcctcgcggttggtgatgatggtctccagccgccccatggccgtggggaccgcctggtccacgtactgcagggtctcgagttcggccatgacgcgctcggtcgccgcgcggtacgtctcctgcatgatggtccgggcggtctcggatccgtccgcgcgcttcagggccgagaaggcggcgtagtttcccagcacgtcgcagtcgctgtacatgctgttcatggtcccgaagacgccgatggctccgcgggcggcgctggcgaactttggatggcgcgcccggaggcgcatgagcgtcgtgtgtacgcaggcgtggcgcgtgtcgaaggtgcataggttacagggcacgtcggtctggttggagtccgcgacgtatcgaaacacgtccatctcctggcgcccgacgatcacggcgccgtcgcagcgctccaggtaaaacagcatcttggccagcagcgccggggaaaacccacacagcatggccaggtgctcgccggcaaattcctgggttccgccgacgaggggcgcggtgggccgaccctcgaacccgggcaccacgtgtccctcgcggtccacctgtgggttggccgccacgtgggtcccgggcacgaggaagaagcggtaaaaggagggtttgctgtggtcctttgggtccgccgggccggcgtcgtccacctcggtgagatggagggccgagttggtgctaaataccatggcccccacgagtcccgcggcgcgcgccaggtacgccccgacggcgttggcgcgggccgcggccgtgtcctggccctcgaacagcggccacgcggagatgtcggtgggcggctcgtcaaagacggccatcgacacgatagactcgagggccagggcggcgtctccggccatgacggaggccaggcgctgttcgaacccgcccgccgcgcccttgccgccgccgtcgcgcccgccccgcggggtcttaccctggctggcttcgaaggccgtgaacgtaatgtcggcggggagggcggcgccctcgtggttttcgtcaaacgccaggtgggcggccgcgcgggccacggcgtccacgtttcggcatcgcagtgccacggcggcgggtcccacgaccgcctcgaacaggaggcggttgagggggcggttaaaaaacggaagcgggtaggtaaatttctccccgatcgatcggtggttggcgttgaacggctctgcgatgacacggctaaaatccggcatgaacagctgcaacgggtacacgggtatgcggtgcacctccgccccgcctatggttaccttgtccgagcctcccaggtgcagaaaggtgttgttgatgcacacggcctccttgaagccctcggtaacgaccagatacaggagggcgcggtccgggtccaggccgaggcgctcacacagcgcctcccccgtcgtctcgtgtttgaggtcgccgggccggggggtgtagtccgaaaagccaaaatggcggcgtgcccgctcgcaaagtcgcgtcaggttcggggcctgggtgctggggtccaggtgccggccgccgtgaaagacgtacacggacgagctgtagtgcgagggcgtcagtttcagggacaccgcggtacccccgagccccgtcgtgcgagaacccacgaccacggccacgttggcctcaaagccgctctccacggtcaggcccacgaccaggggcgccacggcgacgtcggaatcgccgctgcgtgccgacagtaacgccagaagctcgatgccttcggacggacacgcgcgagcgtacacgtatcccaggggcccgggggggaccttgatggtggttgccgtcttgggctttgtctccatgtccttttgtcaatcggtccgcgaacggaggtaatcccggcacgacgacggacgcccgacaaggtatgtctcccgagcgtcaaaatccgggggggggcggcgacggtcaaggggagggttggagaccggggttggggaatgaatccctccccttcaccgacaaccccccgggtaaccacggggtcgccgatgaaccccggcggccggcaacgcggggtccctgcgagaggcacagatgcttacggtcaggtgctccgggtcgggtgcgtctggtatgcggttggtatatgtacactttacctgggggcgtgccggtccgccccagcccctcccacgccccgcgcgtcatcagccggtgggcgtggccgctattataaaaaaagtgagaacgcgaagcgttcgcactttgtcctaataatatatatattattaggacaaagtgcgaacgcttcgcgttctcactttttttataatagcggccacgcccaccggctacgtcactctcctgtcggccgccggcggtccataagcccggccggccgggccgacgcgaataaaccgggccgccggccggggcgccgcgcagcagctcgccgcccggatccgccagacaaacaaggcccttgcacatgccggcccgggcgagcctgggggtccggtaattttgccatcccacccaagcggctttttgggtttttctcttcccccctccccacattcccctctttaggggttcgggtgggaacaaccgcgatgttttccggtggcggcggcccgctgtcccccggaggaaagtcggcggccagggcggcgtccgggttttttgcgcccgccggccctcgcggagccagccggggacccccgccttgtttgaggcaaaacttttacaacccctacctcgccccagtcgggacgcaacagaagccgaccgggccaacccagcgccatacgtactatagcgaatgcgatgaatttcgattcatcgccccgcgggtgctggacgaggatgcccccccggagaagcgcgccggggtgcacgacggtcacctcaagcgcgcccccaaggtgtactgcgggggggacgagcgcgacgtcctccgcgtcgggtcgggcggcttctggccgcggcgctcgcgcctgtggggcggcgtggaccacgccccggcggggttcaaccccaccgtcaccgtctttcacgtgtacgacatcctggagaacgtggagcacgcgtacggcatgcgcgcggcccagttccacgcgcggtttatggacgccatcacaccgacggggaccgtcatcacgctcctgggcctgactccggaaggccaccgggtggccgttcacgtttacggcacgcggcagtacttttacatgaacaaggaggaggtcgacaggcacctacaatgccgcgccccacgagatctctgcgagcgcatggccgcggccctgcgcgagtccccgggcgcgtcgttccgcggcatctccgcggaccacttcgaggcggaggtggtggagcgcaccgacgtgtactactacgagacgcgccccgctctgttttaccgcgtctacgtccgaagcgggcgtgtgctgtcgtacctgtgcgacaacttctgcccggccatcaagaagtacgagggtggggtcgacgccaccacccggttcatcctggacaaccccgggttcgtcaccttcggctggtaccgtctcaaaccgggccggaacaacacgctagcccagccggcggccccgatggccttcgggacatccagcgacgtcgagtttaactgtacggcggacaacctggccatcgaggggggcatgagcgacctaccggcatacaagctcatgtgcttcgatatcgaatgcaaggcggggggggaggacgagctggcctttccggtggccgggcacccggaggacctggtcatccagatatcctgtctgctctacgacctgtccaccaccgccctggagcacgtcctcctgttttcgctcggttcctgcgacctccccgaatcccacctgaacgagctggcggccaggggcctgcccacgcccgtggttctggaattcgacagcgaattcgagatgctgttggccttcatgacccttgtgaaacagtacggccccgagttcgtgaccgggtacaacatcatcaacttcgactggcccttcttgctggccaagctgacggacatttacaaggtccccctggacgggtacggccgcatgaacggccggggcgtgtttcgcgtgtgggacataggccagagccacttccagaagcgcagcaagataaaggtgaacggcatggtgaacatcgacatgtacgggattataaccgacaagatcaagctctcgagctacaagctcaacgccgtggccgaagccgtcctgaaggacaagaagaaggacctgagctatcgcgacatccccgcctactacgccgccgggcccgcgcaacgcggggtgatcggcgagtactgcatacaggattccctgctggtgggccagctgttttttaagtttttgccccatctggagctctcggccgtcgcgcgcttggcgggtattaacatcacccgcaccatctacgacggccagcagatccgcgtctttacgtgcctgctgcgcctggccgaccagaagggctttattctgccggacacccaggggcgatttaggggcgccgggggggaggcgcccaagcgtccggccgcagcccgggaggacgaggagcggccagaggaggagggggaggacgaggacgaacgcgaggagggcgggggcgagcgggagccggagggcgcgcgggagaccgccggcaggcacgtggggtaccagggggccagggtccttgaccccacttccgggtttcacgtgaaccccgtggtggtgttcgactttgccagcctgtaccccagcatcatccaggcccacaacctgtgcttcagcacgctctccctgagggccgacgcagtggcgcacctggaggcgggcaaggactacctggagatcgaggtgggggggcgacggctgttcttcgtcaaggctcacgtgcgagagagcctcctcagcatcctcctgcgggactggctcgccatgcgaaagcagatccgctcgcggattccccagagcagccccgaggaggccgtgctcctggacaagcagcaggccgccatcaaggtcgtgtgtaactcggtgtacgggttcacgggagtgcagcacggactcctgccgtgcctgcacgttgccgcgacggtgacgaccatcggccgcgagatgctgctcgcgacccgcgagtacgtccacgcgcgctgggcggccttcgaacagctcctggccgatttcccggaggcggccgacatgcgcgcccccgggccctattccatgcgcatcatctacggggacacggactccatctttgtgctgtgccgcggcctcacggccgccgggctgacggccgtgggcgacaagatggcgagccacatctcgcgcgcgctgtttctgccccccatcaaactcgagtgcgaaaagacgttcaccaagctgctgctgatcgccaagaaaaagtacatcggcgtcatctacgggggtaagatgctcatcaagggcgtggatctggtgcgcaaaaacaactgcgcgtttatcaaccgcacctccagggccctggtcgacctgctgttttacgacgataccgtctccggagcggccgccgcgttagccgagcgccccgcggaggagtggctggcgcgacccctgcccgagggactgcaggcgttcggggccgtcctcgtagacgcccatcggcgcatcaccgacccggagagggacatccaggactttgtcctcaccgccgaactgagcagacacccgcgcgcgtacaccaacaagcgcctggcccacctgacggtgtattacaagctcatggcccgccgcgcgcaggtcccgtccatcaaggaccggatcccgtacgtgatcgtggcccagacccgcgaggtagaggagacggtcgcgcggctggccgccctccgcgagctagacgccgccgccccaggggacgagcccgccccccccgcggccctgccctccccggccaagcgcccccgggagacgccgtcgcctgccgaccccccgggaggcgcgtccaagccccgcaagctgctggtgtccgagctggccgaggatcccgcatacgccattgcccacggcgtcgccctgaacacggactattacttctcccacctgttgggggcggcgtgcgtgacattcaaggccctgtttgggaataacgccaagatcaccgagagtctgttaaaaaggtttattcccgaagtgtggcaccccccggacgacgtggccgcgcggctccggaccgcagggttcggggcggtgggtgccggcgctacggcggaggaaactcgtcgaatgttgcatagagcctttgatactctagcatgagccccccgtcgaagctgatgtccctcattttacaataaatgtctgcggccgacacggtcggaatctccgcgtccgtgggtttctctgcgttgcgccggaccacgagcacaaacgtgctctgccacacgtgggcgacgaaccggtaccccgggcacgcggtgagcatccggtctatgagccggtagtgcaggtgggcggacgtgccgggaaagatgacgtacagcatgtggcccccgtaagtggggtccgggtaaaacaacagccgcgggtcgcacgccccgcctccgcgcaggatcgtgtggacgaaaaaaagctcgggttggccaagaatcccggccaagaggtcctggaggggggcgttgtggcggtcggccaacacgaccaaggaggccaggaaggcgcgatgctcgaatatcgtgttgatctgctgcacgaaggccaggattagggcctcgcggctggtggcggcgaaccgcccgtctcccgcgttgcacgcgggacagcaacccccgatgcctaggtagtagcccatcccggagagggtcaggcagttgtcggccacggtctggtccagacagaagggcagcgagacgggagtggtcttcaccaggggcaccgagagcgagcgcacgatggcgatctcctcggagggcgtctgggcgagggcggcgaaaaggccccgatagcgctggcgctcgtgtaaacacagctcctgtttgcgggcgtgaggcggcaggctcttccgggaggcccgacgcaccacgcccagagtcccgccggccgcagaggagcgcgaccgccggcgctccttgccgtgatagggcccgggccgggagccgcggcgatgggggtcggtgtcatacataggtacacagggtgtgctccagggacaggagcgagatcgagtggcgtctaagcagcgcgcccgcctcacggacaaatgtggcgagcgcggtgggctttggtacaaatacctgatacgtcttgaaggtgtagatgagggcacgcaacgctatgcagacacgcccctcgaactcgttcccgcaggccagcttggccttgtggagcagcagctcgtcgggatgggtggcggggggatggccgaacagaacccaggggtcaacctccatctccgtaatggcgcacatggggtcacagaacatgtgcttaaagatggcctcgggccccgcggcccgaagcaggctcacaaaccggcccccgtccccgggctgcgtctcggggtcagcctcgagctggtcgacgacgggtacgatacagtcgaagaggctcgtgttgttttccgagtagcggaccacggaggcccggagtctgcgcagggccagccagtaagcacgcaccagtaacaggttacacagcaggcattctccgccggtgcgcccgcgcccccggccgtgtttcagcacggtggccatcagagggcccaggtcgaggtcgggctgggcatcgggttcggtaaactgcgcaaagcgcggagccacgtcgcgcgtgcgtgccccgcgatgcgcttcccaggactggcggaccgtggcgcgacgggcctccgcggcagcgcgcagctggggccccgactcccagacggcgggggtgccggcgaggagcaacaggaccagatccgcgtacgcccacgtatccggcgactcctccggctcgcggtccccggcgaccgtctcgaattccccgttgcgagcggcggcgcgagtacagcagctgtccccgcccccgcgccgaccctccgtgcagtccaggagacgggcgcaatccttccagttcatcagcgcggtggtgagcgacggctgcgtgccggatcccgccgccgaccccgccccctcctcgcccccggaggccaaggttccgatgagggcccgggtggcagactgcgccaggaacgagtagttggagtactgcaccttggcggctcccggggagggcgagggcttgggttgcttctgggcatgccgcccgggcaccccgccgtcggtacggaagcagcagtggagaaaaaagtgccggtggatgtcgtttatggtgagggcaaagcgtgcgaaggagccgaccagggtcgccttcttggtgcgcagaaagtggcggtccatgacgtacacaaactcgaacgcggccacgaagatgctagcggcgcagtggggcgcccccaggcatttggcacagagaaacgcgtaatcggccacccactgaggcgagaggcggtaggtttgcttgtacagctcgatggtgcggcagaccagacagggccggtccagcgcgaaggtgtcgatggccgccgcggaaaagggcccggtgtccaaaagcccctccccacagggatccgggggcgggttgcggggtcctccgcgcccgcccgaaccccctccgtcgcccgcccccccgcgggcccttgagggggcggtgaccacgtcggcggcgacgtcctcgtcgagcgtaccgacgggcggcacacctatcacgtgactggccgtcaggagctcggcgcagagagcctcgttaagagccaggaggctgggatcgaaggccacatacgcgcgctcgaacgcccccgccttccagctgctgccgggggactcttcgcacaccgcgacgctcgccaggaccccggggggcgaagttgccatggctgggcgggaggggcgcacgcgccagcgaactttacgggacacaatccccgactgcgcgctgcggtcccagaccctggagagtctagacgcgcgctacgtctcgcgagacggcgcgcatgacgcggccgtctggttcgaggatatgacccccgccgagctggaggttgtcttcccgactacggacgccaagctgaactacctgtcgcggacgcagcggctggcctccctcctgacgtacgccgggcctataaaagcgcccgacgacgccgccgccccgcagaccccggacaccgcgtgtgtgcacggcgagctgctcgccgccaagcgggaaagattcgcggcggtcattaaccggttcctggacctgcaccagattctgcggggctgacgcgcgtgctgttgggcgggacggttcgcgaaccctttggtgggtttacgcgggcacgcacgctcccatcgcgggcgccatggcgggactgggcaagccctacaccggccacccaggtgacgccttcgagggtctcgttcagcgaattcggcttatcgtcccatctacgttgcggggcggggacggggaggcgggcccctactctccctccagcctcccctccaggtgcgcctttcagtttcatggccatgacgggtccgacgagtcgtttcccatcgagtatgtactgcggcttatgaacgactgggccgaggtcccgtgcaacccttacctgcgcatacagaacaccggcgtgtcggtgctgtttcaggggttttttcatcgcccacacaacgcccccgggggcgcgattacgccagagcggaccaatgtgatcctgggctccaccgagacgacggggctgtccctcggcgacctggacaccatcaaggggcggctcggcctggatgcccggccgatgatggccagcatgtggatcagctgctttgtgcgcatgccccgcgtgcagctcgcgtttcggttcatgggccccgaagatgccggacggacgagacggatcctgtgccgcgccgccgagcaggctattacccgtcgccgccgaacccggcggtcccgggaggcgtacggggccgaggccgggctgggggtggccggaacgggtttccgggccaggggggacggttttggcccgctccccttgttaacccaagggccctcccgcccgtggcaccaggccctgcggggtcttaagcacctacggattggcccccccgcgctcgttttggcggcgggactcgtcctgggggccgctatttggtgggtggttggtgctggcgcgcgcctataaaaaaggacgcaccgccgccctaatcgccagtgcgttccggacgccttcgccccacacagccctcccgaccgacacccccatatcgcttcccgacctccggtcccgatggccgtcccgcaatttcaccgccccagcaccgttaccaccgatagcgtccgggcgcttggcatgcgcgggctcgtcttggccaccaataactctcagtttatcatggataacaaccacccgcacccccagggcacccaaggggccgtgcgggagtttctccgcggtcaggcggcggcgctgacggaccttggtctggcccacgcaaacaacacgtttaccccgcagcctatgttcgcgggcgacgccccggccgcctggttgcggcccgcgtttggcctgcggcgcacctattcaccgtttgtcgttcgagaaccttcgacgcccgggaccccgtgaggcccggggagttccttctggggtgttttaatcaataaaagaccacaccaacgcacgagccttgcgtttaatgtcgtgtttattcaagggagtgggatagggttcgacggttcgaaacttaacacaccaaataatcgagcgcgtctagcccagtaacatgcgcacgtgatgtaggctggtcagcacggcgtcgctgtgatgaagcagcgcccggcgggtccgctgtaactgctgttgtaggcggtaacaggcgcggatcagtaccgccagggcgctacgaccggtgcgttgcacgtagcgtcgcgacagaactgcgtttgccgatacgggcggggggccgaattgtaagcgcgtcacctcttgggagtcatcggcggataacgcactgaatggttcgttggttatgggggagtgtggttccccagggagtgggtcgagcgcctcggcctcggaatccgagaggaacaacgaggtggcgtcggagtcttcgtcgtcagagacatacagggtctgaagcagcgacacgggcgggggggtagcgtcgatgtgtagcgcgagggaggatgcccacgaagacaccccagacaaggagctgcccgtgcgtggatttgtggaagacgcggaagccgggacggatgggcggttttgcggtgcccggaaccgaaccgccggatactccccgggtgctacatgcccgttttggggctggggttggggctggggttggggctggggttggggctggggttggggctggggttggggctggggttggggttggggttggggctggggttggggttggggctggggctggggctggggctggggctggggctggggctggggctggggctggggctggggctggggctggggctggggctggggctggggctggggttggggcgcggacaggcggctgacggtcaaatgcccccgggggcgcgcagatgtggtgggcgtggccaccggctgccgtgtagtggggcggcgggaaaccgggcctccgggcgcaacaccgccctccagcgtcaagtatgtggggggcgggcctgacgtcgggggcggggcgacgggttggaccgcgggaggcgggggagagggacctgcgggagaggatgaggtcggctcggccgggttgcggcctaaaacaggggccgtggggtcggcggggtcccagggtgaagggagggattcccgcgattcggacagcgacgcgacagcggggcgcgtaaggcgccgctgcggcccgcctacgggaaccctggggggggttggcgcgggacccgaggttagcggggggcggcggttttcgcccccgggcaaaaccgtgccggttgcgaccgggggcggaacgggatcgatagggagagcgggagaagcctggccggcggcctggggcccgagcgggaggggcacaccagacaccaaagcgtggggcgctggctctgggggtttgggaggggccggggggcgcgcgaaatcggtaaccggggcgaccgtgtcggggagggcaggcggccgccaaccctgggtggtcgcggaagcctgggtggcgcgcgccagggagcgtgcccggcggtgtcggcgcgcgcgcgacccggacgaagaagcggcagaagcgcgggaggaggcgggggggcggggggcggtggcatcggggggcgccggggaactttggggggacggcaagcgccggaagtcgtcgcgggggcccacgggcgccggccgcgtgctttcggccgggacgcccggtcgtgcttcgcgagccgtgactgccggcccagggggccgcggtgcacactgggacgtggggacggactgatcggcggtgggcgaaagggggtccggggcaaggaggggcgcggggccgccggagtcgtcagacgcgagctcctccaggccgtgaatccatgcccacatgcgaggggggacgggctcgccgggggtggcgtcggtgaatagcgtgggggccaggcttccgggccccaacgagccctccgccccaacaaggtccacagggccgggggtcgggtttgggaccgaggggctctggtcgtcgggggcgcgctggtacaccggatgccccgggaatagctcccccgacaggagggaggcgtcgaacggccgcccgaggatagctcgcgcgaggaaggggtcctcgtcggtggcgctggcggcgaggacgtcctcgccgcccgccacaaacgggagctcctcggtggcctcgctgccaacaaaccgcacgtcgggggggccgggggggtccgggttttcccacaacaccgcgaccggggtcatggagatgtccacgagcaccagacacggcgggccccgggcgaggggccgctcggcgatgagcgcggacaggcgcgggagctgtgccgccagacacgcgttttcgatcgggttcaggtcggcgtgcaggaggcggacggcccacgtctcgatgtcggacgacacggcatcgcgcaaggcggcgtccggcccgcgagcgcgtgagtcaaacagcgtgagacacagctccagctccgactcgcgggaaaaggccgtggtgttgcggagcgccacgacgacgggcgcgcccaggagcactgccgccagcaccaggtccatggccgtaacgcgcgccgcgggggtgcggtgggtggcggcggccggcacggcgacgtgctggcccgtgggccggtagagggcgttggggggagcggggggtgacgcctcgcgcccccccgaggggctcagcgtctgcccagattccagacgcgcggtcagaagggcgtcgaaactgtcatactctgtgtagtcgtccggaaacatgcaggtccaaagagcgaccagagcggtgcttgggagacacatgcgcccgaggacgctcaccgccgccagcgcctgggcgggactcagctttcccagcgcggcgccgcgctcggttcccagctcggggaccgagcgccagggcgccagggggtcggtttcggacaacttgccgcggcgccagtctgccagccgcgtgccgaacatgaggccccgggtcggagggcctccggccgaaaacgctggcagcacgcggatgcgggcgtctggatgcggggtcaggcgctgcacgaatagcatggaatctgctgcgttctgaaacgcacgggggagggtgagatgcatgtactcgtgttggcgaaccagatccaggcgccaaaaggtgtaaatgtgttccggggagctggccaccagcgccaccagcacgtcgttctcgttaaaggaaacgcggtgcctagtggagctctggggtccgagcggcggccccggggccgccgcgtcacccccccattccagctgggcccagcgacacccaaactcgcgcgtgagagtggtcgcgacgagggcgacgtagagctcggccgccgcatccatcgaggccccccatctcgcctggcggtggcgcacaaagcgtccgaagagctgaaagttggcggcctgggcgtcgctgagggccagctgaagccggttgatgacggtgaggacgtacatggccgtgacggtcgaggccgactccagggtgtccgtcggaagcggggggcgaatgcatgccgcctcgggacacatcagcagcgcgccgagcttgtcggtcacggccgggaagcagagcgcgtactgcagtggcgttccatccgggaccaaaaagctgggggcgaacggccgatccagcgtactggtggcctcgcgcagcaccaggggccccgggcctccgctcactcgcaggtacgcctcgccccggcggcgcagcatctgcgggtcggcctcttggccgggtggggcggacgcccgggcgcgggcgtctagggcgcgaagatccacgagcaggggcgcgggcgcggccgccgcgcccgcgcccgtctggcctgtggccttggcgtacgcgctatataagcccatgcggcgttggatgagctcccgcgcgccccggaactcctccaccgcccatggggccaggtccccggccaccgcgtcgaattccgccaacaggccccccagggtgtcaaagttcatctcccaggccacccttggcaccacctcgtcccgcagccgggcgctcaggtcggcgtgttgggccacgcgccccccgagctcctccacggccccggcccgctcggcgctcttggcgcccaggacgccctggtacttggcgggaaggcgctcgtagtcccgctgggctcgcagccccgacacagtgttggtggtgtcctgcagggcgcgaagctgctcgcatgccgcgcgaaatccctcgggcgatttccaggcccccccgcgaacgcggccgaagcgaccccatacctcgtcccactccgcctcggcctcctcgagagacctccgcagggcctcgacgcggcgacgggtgtcgaagagcgcctgcaggcgcgcgccctgtcgcgtcaggaggcccgggccgtcgccgctggccgcgcttagcgggtgcgtctcaaaggtacgctgggcatgttccaaccaggcgaccgcctgcacgtcgagctcgcgcgccttctccgtctggtccaccagaatttcgacctgatccgcgatctcctccgccgagcgcgcctggtccagcgtcttggccacggtcgccgggacggcgaccaccttcagcagggtcttcagattggccagaccctcggcctcgagctgggcccggcgctcgcgcgcggccagcacctcccgcagccccgccgtgacccgctcggtggcttcggcgcgctgctgtttggcgcgcaccacggcgtccttggtatcggccaggtcctgtcgggtcacgaatgcgacgtagtgcgcgtacgccgtgtccttcacggggctctggtccacgcgctccagcgccgccacgcacgccaccagcgcgtcctcgctcgggcagggcagggtgacccctgcccggacaagctcggcggccgccgccgggtcgttgcgcaccgcggatatctcctccgcggcggcggccaggtccagcgccacgcttccgatcgcgcgccgcgcgtcggcccggagggcgtccaggcgatcgcggatatccacgtactcggcgtagcccttttgaaaaaacggcacgtactggcgcagggccggcacgccccccaagtcttccgacaggtgtaggacggcctcgtggtagtcgataaacccgtcgttcgcctgggcccgctccagcagcccccccgccagccgcagaagccgcgccaggggctcggtgtccacccgaaacatgtcggcgtacgtgtcggccgcggccccgaaggccgcgctccagtcgatgcggtgaatggctgcgagcggggggagcatggggtggcgctggttctcgggggtgtatgggttaaacgcaagggccgtctccagggcaagggtcaccgccttggcgttggttcccagcgcctgttcggcccgctttcggaagtcccgggggttgtagccgtgcgtgcccgccagcgcctgcaggcgacggagctcgaccacgtcaaactcggcaccgctttccacgcggtccagcacggcctccacgtcggcggcccagcgctcgtggctactgcgggcgcgctgggccgccatcttctctctgaggtcggcggtggcggcctcaagttcgtcggcgcggcgtcgcgtggcgccgatgacctttcccagctcctgcagggcgcgcccgctgggggagtggtccccggccgtcccttcggcgtgcaacaggcccccgaacctgccctcgtggcccgcgaggctttcccgcgcgccggtggtcgcgcgcgtcgcggcctggatcagggaggcatgctctccctccggttggttggcggcccggcgcacctggacgacaaggtcggcggcagccgaccctaaggtcgtgagctgggcgatggccacccgcgcgtccagggccaaccgagtcgccttgacgtatcccgcggcgctgtcggccatggccgctaggaaggccaggggggaggccgggtcgctggcggccgcgcccagggccgtcaccgcgtcgaccaggacgcggtgcgcccgcacggccgcatccaccgtcgacgcagggtctgccgttgcgacggcggcgctgccggcgttgatggcgttcgagacggcgtgggctatgatcggggcgtgatcggcgaagaactgcaagagaaacggagtctctggggcgtcggcgaacaggttcttcagcaccaccacgaagctgggatgcaagccagacagagccgtcgccgtgtccggagtcgggtgctccagggcatctcggtactgccccagcagcccccacatgtccgcccgcagcgccgccgtaacctcagggggcgccccccgaacggcctcggggaggtccgaccagcccgccggcagggaggcccgcagggtcgccaggacggccggacaggcctttagccccacaaagtcagggagggggcgcaggaccccctggagtttgtgcaagaacttctcccgggcgtcgcgggccaccttcgcccgctcccgcgctccctcgagcattgcctccagggagcgcgcgcgctcccgcaaacgggcacgcgcatcgggggcgagctctgccgtcagcttggcggcatccatggcccgcgcctgccgcagcgcttcctcggccatgcgcgtggcctctggcgacagcccgccgtcgtcggggtagggcgacgcgccgggcgcaggaacaaaggccgcgtcgctgtccagctgctggcccagggccgcatctagggcgtcgaagcgccgcagctcggccagacccgagctgcggcgcgcctgttggtcgttaatgtcgcggatgctgcgcgccagctcgtccagtggcttgcgttctatcagcccttggttggcggcgtccgtcaggacggagagccaggccgccaggtcctcgggggcgtccagcgtctggccccgctggatcagatcccgcaacaggatggccgtggggctggtcgcgatcgggggcggggcgggaatggcggcgcgctgcgcgatgtcccgcgtgtgctggtcgaagacaggcagggactcgagcagctggaccacgggcacgacggcggccgaagccacgtgaaaccggcggtcgttgttgtcgctggcctgtagagccttggcgctgtatacggccccccggtaaaagtactccttaaccgcgccctcgatcgcccgacgggcctgggtccgcacctcctccagccgaacctgaacggcctcggggcccagggggggtgggcgcggagccccctgcggggccgccccggccggggcgggcattacgccgaggggcccggcgtgctgtgagaccgcgtcgaccccgcgagcgagggcgtcgagggcctcgcgcatctggcgatcctccgcctccaccctaatctcttcgccacgggcaaatttggccagagcctggactctatacagaagcggttctgggtgcgtcggggtggcgggggcaaaaagggtgtccgggtgggcctgcgagcgctccagaagccactcgccgaggcgtgtatacagattggccggcggggccgcgcgaagctgcagctccaggtccgcgagttccccgtaaaaggcgtccgtctcccgaatgacatccctagccacaaggatcagcttcgccagcgccaggcgaccgatcagagagttttcgtccagcacgtgctggacgaggggcagatgggcggccacgtcggccaggctcaggcgcgtggaggccagaaagtcccccacggccgttttccagggcagcatgttcagggtaaactccagcagggcggcggccgggccggccaccccggcctgggtgtgcgtccgggccccgttctcgatgagaaaggcgaggacgcgttcaaagaaaaaaataacacagagctccagcagccccggagaggccggatacggcgaccgtaaggcgctgatggtgagccgcgaacacgcggcgacctcgcgggccagggcggcggagcacgcggtgaacttaaccgccgtggcggccacgtttgggtgggcctcgaacagctgggcgaggtctgcgcccgggggctcgggcgagcggcgagtcttcagcgcctcgagggcctgtgaggacgccggaaccgtgggcccgtcgtcctcgcccgcctcggcgaccggcggcccggccgggtcggggggtgccgaggcgaggacaggctccggaacggaggcggggaccgcggccccgacgggggttttgcctttgggggtggatttcttcttggttttggcagggggggccgagcgtttcgttttctcccccgaagtcaggtcttcgacgctggaaggcggagtccaggtgggtcggcggcgcttgggaaggccggccgagtagcgtgcccggtgccgaccaaccgggacgacgcccatctccaggacccgcatgtcgtcgtcatcttcttcggccgcctctgcggcgggggtcttgggggcggagggaggcggtggtgggatcgcggagggtgggtcggcggagggtgggtcggcggaggggggatccgtgggtggggtacccttcagggccaccgcccatacatcgtcgggcgcccgattcgggcgcttggcctctggttttgccgacggaccggccgtcccccgggatgtctcggaggccctgtcgtcgcgacgggcccgggtcggtggcggcgactgggcggctgtgggcgggtgtggccccgggccccctaccccctcccgggggcccacgccgacgcagggctcccccaggcccgcgatctcgccccgcagggggtgcgtgatggccacgcgccgttcgctgaacgcttcgtcctgcaggtaagtctcgctggccccgtaaagatgcagagccgcggccgtcaagtccgcaggagccgcgggttccgggcccgacggcacgaaaaacaccatggctcccgcccaccgtacgtccgggcgatcgcgggtgtaatacgtcaggtatggatacatgtcccccgcccgcactttggcgatgaacgcgggggtgccctccggaaggccgtgcgggtcaaaaaggtatgcggtgtcgccgtccctgaacagccccatccctagggggccaatggttaggagcgtgtacgacagggggcgcagggcccacgggccggcgaagaacgtgtgtgcggggcattgtgtctccagcaggcccgccgcgggctccccgaagaagcccacctcgccgtatacgcgcgagaagacacagcgcagtccgccgcgcgcccctgggtactcgaggaagttggggagctcgacgatcgaacacatgcgcggcggcccagggcccgcggtcgcgcgcgtccactcgcccccctcgaccaaacatccctcgatggcctccgcggacaggacgtcgcgagggcccacatcaaatatgaggctgagaaaggacagcgacgagcgcatgcacgataccgacccccccggctccaggtcgggcgcgaactggttccgagcaccggtgaccacgatgtcgcgatcccccccgcgttccatcgtggagtgcggtggggtgcccgcgatcatatgtgccctgctggccagagacccggcctgtttatggaccggacccccggggttagtgttgtttccgccacccatgcccccgtaccatggccccggttcccctgattaggctacgagtcgcggtgatcgcttcccaaaaaccgagctgcgtttgtctgtcttggtcttccacccccccccccgcccgcccgcacaccataacaccgagaacaacacacgggggtgggcgtaacataataaagctttattggtaactagttaacggcaagtccgtgggtggcgcgacggtgtcctccgggatcatctcgtcgtcctcgacgggggtgttggaatgaggcgccccctcgcggtccgcctggcgtgggccgtgcccataggcctccggcttctgtgcgtccatgggcataggcgcggggagactgtttccggcgtcgcggacctccaggtccctgggagactccggtccggctaacggacgaaacgcggaagcgcgaaacacgccgtcggtgacccgcaggagctcgttcatcagtaaccaatccatactcagcgtaacggccagcccctggcgagacagatccacggagtccggaaccgcggtcgtctggcccagggggccgaggctgtagtccccccaggcccctaggtcgcgacggctcgtaagcacgacgcggtcggccgcggggctttgcgggggggcgtcctcgggcgcatgcgccattacctctcggatggccgcggcgcgctggtcggccgagctgaccaagggcgccacgaccacggcgcgctccgtctgcaggcccttccacgtgtcgtggagttcctggacaaactcggccacgggctcgggtcccgcggccgcgcgcgcggcttgatagcaggccgacagacgccgccagcgcgctagaaactgacccatgaagcaaaacccggggacctggtctcccgacagcagcttcgacgcccgggcgtgaatgccggacacgacggacagaaacccgtgaatttcgcgccggaccacggccagcacgttgtcctcgtgcgacacctgggccgccagctcgtcgcacacccccaggtgcgccgtggtttcggtgatgacggaacgcaggctcgcgagggacgcgaccagcgcgcgcttggcgtcgtgatacatgctgcagtactgactcaccgcgtcccccatggcctcggggggccagggccccaggcggtcgggcgtgtccccgaccaccgcatacaggcggcgcccgtcgctctcgaaccgacactcgaaaaaggcggagagcgtgcgcatgtgcagccgcagcagcacgatggcgtcctccagttggcgaatcagggggtctgcgcgctcggcgaggtcctgcagcaccccccgggcggccagggcgtacatgctaatcaacaggaggctggtgcccacctcggggggcggggggggctgcagctggaccaggggccgcagctgctcgacggcacccctggagatcacgtacagctcccggagcagctgctctatgttgtcggccatctgcatagtggggccgaggccgccccgggcggccggttcgaggagggtgatcagcgcgcccagtttggtgcgatggccctcaaccgtggggagatagcccagcccaaagtcccgggcccaggccaacacacgcagggcgaactcgaccgggcggggaaggtaggccgcgctacacgtggccctcagcgcgtccccgaccaccagggccagaacgtaggggacgaagcccgggtcggcgaggacgttggggtgaatgccctcgagggcggggaagcggatctgggtcgccgcggccaggtggacagagggggcgtggctgggctgcccgacggggagaagcgcggacagcggcgtggccggggtggtgggggtgatgtcccagtgggtctgaccatacacgtcgatccagatgagcgccgtctcgcggagaaggctgggttgaccggaactaaagcggcgctcggccgtctcaaactcccccacgagcgcccgccgcaggctcgccagatgttccgtcggcacggccggacccatgatacgcgccagcgtctggcttagaacgccccccgacaggccgaccgcctcgcagagccgcccgtgcgtgtgctcgctggcgccctggacccgcctgaaagtttttacgtagttggcatagtacccgtattcccgcgccaacccaaacacgttcgaccccgcgagggcaatgcacccaaagagctgctggacttcgccgagtccgtggccggtgggcgtccgcgcggggacgcccgccgccagaaacccctccagggccgaaaggtagtgcgtgcagtgcgagggcgtgaacccagcgtcgatcagggtgttgatcaccacggagggcgaattggtattctggatcaacgtccacgtctgctgcagcagagccagcagccgctgctgggcgccggcggagggctgctccccgagctgcagcaggctggagacggcaggctggaagactgccagtgccgacgaactcaggaacggcacgtcgggatcaaacacggccacgtccgtccgcacgcgcgccattagcgtccccgggggcgcacaggccgagcgcgggctgacgcggctgagggccgtcgacacgcgcacctcctcgcggctgcgaaccatcttgttggcctcgagcggcggaatcattatggccgggtcgatctcccgcacggtgtgctgaaactgcgccaacaggggcggcgggaccacagccccccgctcgggggtcgtcaggtactcgtccaccagggccaacgtaaagagggcccgtgtgaggggagtgagggtcgcgtcgtctatgcgctggaggtgcgccgagaacagcgtcacccgattactcaccagggccaagaaccggaggccctcttgcacgaacggggcggggaagagcaggctgtacgccggggtggtaaggttcgcgctgggctgccccaacgggaccggcgccatcttgagcgacgtctccccaagggcctcgatggaggtccgcgggctcatggccaagcagctcttggtgacggtttgccagcggtctatccactccacggcgcactggcggacgcggaccggccccagggccgccgcggtgcgcaggccggcggaatccagcgcatgggacgtgtcggagccggtgaccgcgaggatggtgtccttgatgacctccatctcccggaaggcctggtcgggggcctcggggagagccaccaccaagcggtgtacgagcaacccggggaggttctcggccaagagcgccgtctccggaagcccgtgggcccggtggagcgcgcacaggtgttccagcagcggccgccagcagtcccgcgcgtctgccggggcgatggccgttcccgacaacagaaacgccgccatggcggcgcgcagcttggccgtggccagaaacgccgggtcgtccgccccgtttgccgtctcggccgtgggggttggcggttggcgaaggccggctaggctcgccaataggcgctgcataggtccgtccgagggcggaccggcgggtgaggtcgtgacgacgggggcctcggacgggagaccgcggtctgccatgacgcccggctcgcgtgggtgggggacagcgtagaccaacgacgagaccgggcgggaatgactgtcgtgcgctgtagggagcggcgaattatcgatcccccgcggccctccaggacccccgcaggcgttgcgagtaccccgcgtcttcgcggggtgttatacggccacttaagtcccggcatcccgttcgcggacccaggcccgggggattgtccggatgtgcgggcagcccggacggcgtgggttgcggactttctgcggggcggcccaaatggccctttaaacgtgtgtatacggacgcgccgggccagtcggccaacacaacccaccggaggcggtagccgcgtttggctgtggggtgggtggttccgccttgcgtgagtgtcctttcgacccccccccccctccctcccccgggtcttgctaggtcgcgatctggggtcgcaatgaagaccaatccgctacccgcaaccccttccgtgtggggcgggagtaccgtggaactcccccccacaacacgcgataccgcgggacagggcctgcttcggcgcgtcctgcgccccccgatctctcgccgcgacggcccagggctccccagggggtcgggaccccggagggcggccagcacgctgtggttgcttggcctggacggcacagacgcgccccctggggcgctgacccccaacgacgataccgaacaggccctggacaagatcctgcggggcaccatgcgcgggggggcggccctgatcggctccccgcgccatcatctaacccgccaagtgatcctgacggatctgtgccaacccaacgcggatcgtgctgggacgctgcttctggcgctgcggcaccccgccgacctgcctcacctggcccaccagcgcgccccgccaggccggcagaccgagcggctgggcgaggcctggggccagctgatggaggcgaccgccctggggtcggggcgagccgagagcgggtgcacgcgcgcgggcctagtgtcgtttaacttcctggtggcggcgtgtgccgcctcgtacgacgcgcgcgacgccgccgatgcggtacgggcccacgtcacggccaactaccgcgggacgcgggtgggggcgcgcctggatcgtttttccgagtgtctgcgcgccatggttcacacgcacgtcttcccccacgaggtcatgcggtttttcggggggctggtgtcgtgggtcacccaggacgagctagcgagcgtcaccgccgtgtgcgccgggccccaggaggcggcgcacaccggccacccgggccggccccgctcggccgtgatcctcccggcatgtgcgttcgtggacctggacgccgagctggggctggggggcccgggcgcggcgtttctgtacctggtattcacttaccgccagcgccgggaccaggagctgtgttgtgtgtacgtgatcaagagccagctccccccgcgcgggttggagccggccctggagcggctgtttgggcgcctccggatcaccaacacgattcacggcaccgaggacatgacgcccccggccccaaaccgaaaccccgacttccccctcgcgggcctggccgccaatccccaaaccccgcgttgctcggctggccaggtcacgaacccccagttcgccgacaggctgtaccgctggcagccggacctgcgggggcgccccaccgcacgcacctgtacgtacgccgcctttgcagagctcggcatgatgcccgaggatagtccccgctgcctgcaccgcaccgagcgctttggggcggtcagcgtccccgttgtcattctggaaggcgtggtgtggcgccccggcgagtggcgggcatgcgcgtgagcgtagcaaacgccccgcccacacaacgctccgcccccaaccccttccccgctgtcactcgttgttcgttgacccgggcgtccgccaaataaagccactgaaacccgaaacgcgagtgttgtaacgtcctttgggcgggaggaagccacaaaatgcaaatgggatacatggaaggaacacacccccgtgactcaggacatcggtgtgtccttttgggtttcactgaaactggcccgcgccccacccctgcgcgatgtggataaaaagccagcgcgggtggtttagggtaccacaggtgggtgctttggaaacttgccggtcgccgtgctcctgtgagcttgcgtccctccccggtttcctttgcgctcccgccttccggacctgctctcgcctactcttctttggctctcggtgcgattcgtcaggcagcggccttgtcgaatctcgaccccaccactcgccggacccgccgacgtcccctctcgagcccgccgaaacccgccgcgtctgttgaaatggccagccgcccagccgcatcctctcccgtcgaagcgcgggccccggttgggggacaggaggccggcggccccagcgcagccacccagggggaggccgccggggcccctctcgcccacggccaccacgtgtactgccagcgagtcaatggcgtgatggtgctttccgacaagacgcccgggtccgcgtcctaccgcatcagcgataacaactttgtccaatgtggttccaactgcaccatgatcatcgacggagacgtggtgcgcgggcgcccccaggacccgggggccgcggcatcccccgctcccttcgttgcggtgacaaacatcggagccggcagcgacggcgggaccgccgtcgtggcattcgggggaaccccacgtcgctcggcggggacgtctaccggtacccagacggccgacgtccccaccgaggcccttgggggcccccctcctcctccccgcttcaccctgggtggcggctgttgttcctgtcgcgacacacggcgccgctctgcggtattcgggggggagggggatccagtcggccccgcggagttcgtctcggacgaccggtcgtccgattccgactcggatgactcggaggacacggactcggagacgctgtcacacgcctcctcggacgtgtccggcggggccacgtacgacgacgcccttgactccgattcgtcatcggatgactccctgcagatagatggccccgtgtgtcgcccgtggagcaatgacaccgcgcccctggatgtttgccccgggacccccggcccgggcgccgacgccggtggtccctcagcggtagacccacacgcgccgacgccagaggccggcgctggtcttgcggccgatcccgccgtggcccgggacgacgcggaggggctttcggacccccggccacgtctgggaacgggcacggcctaccccgtccccctggaactcacgcccgagaacgcggaggccgtggcgcgctttctgggagatgccgtgaaccgcgaacccgcgctcatgctggagtacttttgccggtgcgcccgcgaggaaaccaagcgtgtcccccccaggacattcggcagcccccctcgcctcacggaggacgactttgggcttctcaactacgcgctcgtggagatgcagcgcctgtgtctggacgttcctccggtcccgccgaacgcatacatgccctattatctcagggagtatgtgacgcggctggtcaacgggttcaagccgctggtgagccggtccgctcgcctttaccgcatcctgggggttctggtgcacctgcggatccggacccgggaggcctcctttgaggagtggctgcgatccaaggaagtggccctggattttggcctgacggaaaggcttcgcgagcacgaagcccagctggtgatcctggcccaggctctggaccattacgactgtctgatccacagcacaccgcacacgctggtcgagcgggggctgcaatcggccctgaagtatgaggagttttacctaaagcgttttggcgggcactacatggagtccgtcttccagatgtacacccgcatcgccggctttttggcctgccgggccacgcgcggcatgcgccacatcgccctggggcgagaggggtcgtggtgggaaatgttcaagttctttttccaccgcctctacgaccaccagatcgtaccgtcgacccccgccatgctgaacctggggacccgcaactactacacctccagctgctacctggtaaacccccaggccaccacaaacaaggcgaccctgcgggccatcaccagcaacgtcagtgccatcctcgcccgcaacgggggcatcgggctatgcgtgcaggcgtttaacgactccggccccgggaccgccagcgtcatgcccgccctcaaggtccttgactcgctggtggcggcgcacaacaaagagagcgcgcgtccgaccggcgcgtgcgtgtacctggagccgtggcacaccgacgtgcgggccgtgctccggatgaagggggtcctcgccggcgaagaggcccagcgctgcgacaatatcttcagcgccctctggatgccagacctgtttttcaagcgcctgattcgccacctggacggcgagaagaacgtcacatggaccctgttcgaccgggacaccagcatgtcgctcgccgactttcacggggaggagttcgagaagctctaccagcacctcgaggtcatggggttcggcgagcagatacccatccaggagctggcctatggcattgtgcgcagtgcggccacgaccgggagccccttcgtcatgttcaaagacgcggtgaaccgccactacatctacgacacccagggggcggccatcgccggctccaacctctgcaccgagatcgtccatccggcctccaagcgatccagtggggtctgcaacctgggaagcgtgaatctggcccgatgcgtctccaggcagacgtttgactttgggcggctccgcgacgccgtgcaggcgtgcgtgctgatggtgaacatcatgatcgacagcacgctacaacccacgccccagtgcacccgcggcaacgacaacctgcggtccatgggaatcggcatgcagggcctgcacacggcctgcctgaagctggggctggatctggagtctgccgaatttcaggacctgaacaaacacatcgccgaggtgatgctgctgtcggcgatgaagaccagcaacgcgctgtgcgttcgcggggcccgtcccttcaaccactttaagcgcagcatgtatcgcgccggccgctttcactgggagcgctttccggacgcccggccgcggtacgagggcgagtgggagatgctacgccagagcatgatgaaacacggcctgcgcaacagccagtttgtcgcgctgatgcccaccgccgcctcggcgcagatctcggacgtcagcgagggctttgcccccctgttcaccaacctgttcagcaaggtgacccgggacggcgagacgctgcgccccaacacgctcctgctaaaggaactggaacgcacgtttagcgggaagcgcctcctggaggtgatggacagtctcgacgccaagcagtggtccgtggcgcaggcgctcccgtgcctggagcccacccaccccctccggcgattcaagaccgcgtttgactacgaccagaagttgctgatcgacctgtgtgcggaccgcgccccctacgtcgaccatagccaatccatgaccctgtatgtcacggagaaggcggacgggaccctcccagcctccaccctggtccgccttctggtccacgcatataagcgcggactaaaaacagggatgtactactgcaaggttcgcaaggcgaccaacagcggggtctttggcggcgacgacaacattgtctgcatgagctgcgcgctgtgaccgacaaaccccctccgcgccaggcccgccgccactgtcgtcgccgtcccacgctctcccctgctgccatggattccgcggccccagccctctcccccgctctgacggcccttacggaccagagcgcgacggcggacctggcgatccagattccaaagtgccccgaccccgagaggtacttctacacctcccagtgtcccgacattaaccacctgcgctccctcagcatccttaaccgctggctggaaaccgagcttgttttcgtgggggacgaggaggacgtctccaagctttccgagggcgagctcagcttttaccgcttcctcttcgctttcctgtcggccgccgacgacctggttacggaaaacctgggcggcctctccggcctgtttgagcagaaggacattctccactactacgtggagcaggaatgcatcgaagtcgtacactcgcgcgtgtacaacatcatccagctggtgcttttccacaacaacgaccaggcgcgccgcgagtacgtggccggtaccatcaaccacccggccatccgcgccaaggtggactggttggaagcgcgggtgcgggaatgcgcctccgttccggaaaagttcattctcatgatcctcatcgagggcatcttttttgccgcctcgtttgccgccatcgcctaccttcgcaccaacaaccttctgcgggtcacctgccagtcaaacgacctcatcagccgggacgaggccgtgcacacgacggcctcgtgttacatctacaacaactacctcggcgggcacgccaagcccccgcccgaccgcgtgtacgggctgttccgccaggcggtcgagatcgagatcggatttatccgatcccaggcgccgacggacagccatatcctgagcccggcggcgctggcggccatcgaaaactacgtgcgattcagcgcggatcgcctgttgggccttatccacatgaagccactgttttccgccccaccccccgacgccagctttccgctgagcctcatgtccaccgacaaacacaccaattttttcgagtgtcgcagcacctcctacgccggggcggtcgtcaacgatctgtgagtgtcgcggcgcgcttctacccgtgtttgcccataataaacctctgaaccaaactttgggtctcattgtgattcttgtcagggacgcgggggtgggagaggataaaaggcggcgcaaaaagcagtaaccaggtccgtccagattctgcgggcataggataccataattttattggtgggtcgtttgttcggggacaagcgcgctcgtctgacgtttgggctactcgtcccagaatttggccaggacgtccttgtagaacgcgggtgggggggcctgggtccgcaactgctccagaaacctgtcggcgatatcaggggccgtgatatgccgggtcacgatagatcgcgccaggttttcgtcgcggatgtcctggtagataggcaggcgtttcagaagagtccacggcccccgctccttggggccgataagcgatatgacgtacttaatgtagcggtgttccaccagctcggtgatggtcatgggatcggggagccagtccagggactctggggcgtcgtggatgacgtggcgtcgcgggttggccacataactgcggtgctcttccagcagctgcgcgttcgggacctggacgagctcgggcggggtgagtatctccgaggaggacgacctggggccggggtggcccccggtaacgtcccggggatccagggggaggtcctcgtcgtcttcgtatccgccggcgatctgttgggttagaatttcggtccacgagacgcgcgtctcggtgccgccggcggccggcggcagagggggcctggtttccgtggagcgcgagctggtgtgttcccggcggatggcccgccgggtctgagagcgactcgggggggtccagtgacattcgcgcagcacatcctccacggaggcgtaggtgttattgggatggaggtcggtgtggcagcggacaaagagggccaggaactgggggtagctcatcttaaagtactttagtatatcgcgacagttgatcgtgggaatgtagcaggcgctaatatccaacacaatatcacagcccatcaacaggaggtcagtgtccgtggtgtacacgtacgcgaccgtgttggtgtgatagaggttggcgcaggcatcgtccgcctccagctgacccgagttaatgtaggcgtaccccagggcccggagaacgcgaatacagaacagatgcgccagacgcagggccggcttcgagggcgcggcggacggcagcgcggctccggacccggccgtcccccgggtccccgaggccagagaggtgccgcgccggcgcatgttggaaaaggcagagctgggtctggagtcggtgatgggggaaggcggtggagaggcgtccacgtcactggcctcctcgtccgtccggcactgggccgtcgtgcgggccaggatggccttggctccaaacacaaccggctccatacaattgaccccgcgatcggtaacgaagatggggaaaagggacttttgggtaaacacctttaataagcgacagaggcagtgtagcgtaatggcctcgcggtcgtaactggggtatcggcgctgatatttgaccaccaacgtgtacatgacgttccacaggtccacggcaatgggggtgaagtacccggccggggccccaaggccccggcgcttgaccagatggtgtgtgtgggcaaacttcatcatcccgaacaaacccatgtcaggtcaattgtaactgcggatcggcctaactaaggcgtggttggtgcgacggtccgggacacccgagcctgtctctctgtgtatggtgacccagacaacaacaccgacacaagaggacaataatccgttaggggacgctctttataatttcgatggcccaactccacgcggattggtgcagcaccctgcatgcgccggtgcgggccaaccttccccccgctcattgcctcttccaaaagggtgtggcctaacgagctgggggcgtatttaatcaggctagcgcggcgggcctgccgtagtttctggctcggtgagcgacggtccggttgcttgggtcccctggctgccatcaaaaccccaccctcgcagcggcatacgccccctccgcgtcccgcacccgagaccccggcccggctgccctcaccaccgaagcccacctcgtcactgtggggtgttcccagcccgcgttgggatgacggattcccctggcggtgtggcccccgcctcccccgtggaggacgcgtcggacgcgtccctcgggcagccggaggagggggcgccctgccaggtggtcctgcagggcgccgaacttaatggaatcctacaggcgtttgccccgctgcgcacgagccttctggactcgcttctggttatgggcgaccggggcatccttatccataacacgatctttggggagcaggtgttcctgcccctggaacactcgcaattcagtcggtatcgctggcgcggacccacggcggcgttcctgtctctcgtggaccagaagcgctccctcctgagcgtgtttcgcgccaaccagtacccggacctacgtcgggtggagttggcgatcacgggccaggccccgtttcgcacgctggttcagcgcatatggacgacgacgtccgacggcgaggccgttgagctagccagcgagacgctgatgaagcgcgaactgacgagctttgtggtgctggttccccagggaacccccgacgttcagttgcgcctgacgaggccgcagctcaccaaggtccttaacgcgaccggggccgatagtgccacgcccaccacgttcgagctcggggttaacggcaaattttccgtgttcaccacgagtacctgcgtcacctttgctgcccgcgaggagggcgtgtcgtccagcaccagcacccaggtccagatcctgtccaacgcgctcaccaaggcgggccaggcggccgccaacgccaagacggtgtacggggaaaatacccatcgcaccttctctgtggtcgtcgacgattgcagcatgcgggcggtgctccggcgactgcaggtcggcgggggcaccctcaagttcttcctcacgacccccgtccccagtctgtgcgtcaccgccaccggtcccaacgcggtatcggcggtatttctcctgaaaccccagaagatttgcctggactggctgggtcatagccaggggtctccttcagccgggagctcggcctcccgggcctctgggagcgagccaacagacagccaggactccgcgtcggacgcggtcagccacggcgatccggaagacctcgatggcgctgcccgggcgggagaggcgggggccttgcatgcctgtccgatgccgtcgtcgaccacgcgggtcactcccacgaccaagcgggggcgctcggggggcgaggatgcgcgcgcggacacggccctaaagaaacctaagacggggtcgcccaccgcacccccgcccgcagatccagtccccctggacacggaggacgactccgatgcggcggacgggacggcggcccgtcccgccgctccagacgcccggagcggaagccgttacgcgtgttactttcgcgacctcccgaccggagaagcaagccccggcgccttctccgccttccgggggggcccccaaaccccgtatggttttggattcccctgacggggcggggccttggcggccgcccaactctcgcaccatcccgggttaatgtaaataaacttggtattgcccaacactttcccgcgtgtcgcgtgtggttcatgtgtgtgcctggcgcccccaccctcgggttcgtgtatttcctttccctgtccttataaaagccgtatgtggggcgtgacggaaccaccccgcgtgccatcacggccaaggcgcgggatgctccgcaacgacagccaccgggccgtgtccccggaggacggccagggacgggtcgacgacggacggccacacctcgcgtgcgtgggggccctggcgcgggggttcatgcatatctggcttcaggccgccacgctgggttttgcgggatcggtcgttatgtcgcgcgggccgtacgcgaatgccgcgtctggggcgttcgccgtcgggtgcgccgtgctgggctttatgcgcgcaccccctcccctcgcgcggcccaccgcgcggatatacgcctggctcaaactggcggccggtggagcggcccttgttctgtggagtctcggggagcccggcacgcagccgggggccccggccccgggcccggccacccagtgcctggcactgggcgccgcctatgcggcgctcctggtgctcgccgatgacgtctatccgctctttctcctcgccccggggcccctgttcgtcggcaccctggggatggtcgtcggcgggctgacgatcggaggcagcgcgcgctactggtggatcggtgggcccgccgcggccgccctggccgcggcggtgttggcgggcccgggggcgaccaccgccagggactgcttttccagggcttgccccgaccaccgccgcgtctgtgtcatcaccgcaggcgagtctctttcccgccgccccccggaggacccagagcgacccggggttcccgggcccccgtcccccccgaccccccaacgatcccacgggccgccggccgatgaggtcgcaccggccagggtcgcgcggcccgaaaacgtctgggtgcccgtggtcacctttctgggggcgggcgcgcttgccgtcaagacggtgcgagaacatgcccggggaacgccgggcccgggcctgccgctgtggccccaggtgtttctcggaggccatgtggcggtggccctgacggagctgtgtcaggcgcttccgccctgggaccttacggacccgctgctgtttgttcacgccggactgcaggtcatcaacctcgggttggtgtttcggttttccgaggttgtcgtgtatgcggcgctagggggtgccgtgtggatttcgttggcgcaggtgctggggctccggcgtcgcctgcacaggaaggaccccggggacggggcccggttggcggcgacgcttcggggcctcttcttctccgtgtacgcgctggggtttggggtgggggtgctgctgtgccctccggggtcaacgggcgggcggtcgggcgattgatatatttttcaataaaaggcattagtcccgaagaccgccggtgtgtgatgatttcgccataacacccaaaccccggatggggcccgggtataaattccggaaggggacacgggctaccctcactatcgagggcgcttggtcgggaggccgcatcgaacgcacacccccatccggtggtccgtgtggaggtcgttttcatgcccggtctcgctttgccgggaacgctagccgatccctcgcgagggggaggcgtcgggcatggccccggggcgggtgggccttgccgtggtcctgtggagcctgttgtggctcggggcgggggtgtccgggggctcggaaactgcctccaccgggcccacgatcaccgcgggagcggtgacgaacgcgagcgaggcccccacatcggggtcccccgggtcagccgccagcccggaggtcacccccacatcgaccccaaaccccaacaatgtcacacaaaacaaaaccacccccaccgagccggccagccccccaacaacccccaagcccacctccacgcccaaaagcccccccacgtccacccccgaccccaaacccaagaacaacaccacccccgccaagtcgggccgccccactaaaccccccgggcccgtgtggtgcgaccgccgcgacccattggcccggtacggctcgcgggtgcagatccgatgccggtttcggaattccacccgcatggagttccgcctccagatatggcgttactccatgggtccgtcccccccaatcgctccggctcccgacctagaggaggtcctgacgaacatcaccgccccacccgggggactcctggtgtacgacagcgcccccaacctaacggacccccacgtgctctgggcggagggggccggcccgggcgccgaccctccgttgtattctgtcaccgggccgctgccgacccagcggctgattatcggcgaggtgacgcccgcgacccagggaatgtattacttggcctggggccggatggacagcccgcacgagtacgggacgtgggtgcgcgtccgcatgttccgccccccgtctctgaccctccagccccacgcggtgatggagggtcagccgttcaaggcgacgtgcacggccgccgcctactacccgcgtaaccccgtggagtttgtctggttcgaggacgaccaccaggtgtttaacccgggccagatcgacacgcagacgcacgagcaccccgacgggttcaccacagtctctaccgtgacctccgaggctgtcggcggccaggtccccccgcggaccttcacctgccagatgacgtggcatcgcgactccgtgacgttctcgcgacgcaatgccaccgggctggccctggtgctgccgcggccaaccatcaccatggaatttggggtccgcattgtggtctgcacggccggctgcgtccccgagggcgtgacgtttgcctggttcctgggggacgacccctcaccggcggctaagtcggccgttacggcccaggagtcgtgcgaccaccccgggctggctacggtccggtccaccctgcccatttcgtacgactacagcgagtacatctgtcggttgaccggatatccggccgggattcccgttctagaacaccacggcagtcaccagcccccacccagggaccccaccgagcggcaggtgatcgaggcgatcgagtgggtggggattggaatcggggttctcgcggcgggggtcctggtcgtaacggcaatcgtgtacgtcgtccgcacatcacagtcgcggcagcgtcatcggcggtaacgcaagacccccccgttacctttttaatatctatatagtttggtcccccctctatcccgcccaccgctgggcgctataaagccgccaccctctcttccctcaggtcatccttggtcgatcccgaacgacacacggcgtggagcaaaacgcctccccctgagccgctttcctaccaacacaacggcatgcctctgcgggcatcggaacacgcctaccggcccctgggccccgggacaccccccatgcgggctcggctccccgccgcggcctgggttggcgtcgggaccatcatcgggggagttgtgatcattgccgcgttggtcctcgtgccctcgcgggcctcgtgggcactttccccatgcgacagcggatggcacgagttcaacctcgggtgcatatcctgggatccgacccccatggagcacgagcaggcggtcggcggctgtagcgccccggcgaccctgatcccccgcgcggctgccaaacagctggccgccgtcgcacgcgtccagtcggcaagatcctcgggctactggtgggtgagcggagacggcattcgggcctgcctgcggctcgtcgacggcgtcggcggtattgaccagttttgcgaggagcccgcccttcgcatatgctactatccccgcagtcccgggggctttgttcagtttgtaacttcgacccgcaacgcgctggggctgccgtgaggcgcgtgtactgcggtctgtctcgtctcctcttctccccttccctccccctccgcatcccaggatcacaccggtcaacgagggttgggggggtccggcacggacccaaaataataaacacacaatcacgtgcgataaaaagaacacgcggtcccctgtggtgtttttggttatttttattaaatctcgtcgacaaacagggggaaaggggcgtggtctagcgacggcagcacgggcggaggcgttcaccggctccggcgtccttcgcgtttaagcttggtcaggagggcgctcagggcggcgacgttggtcgggccgtcgttggtcagggcgttggctcgatggcgggcgaggacgggcgaggggctcaacggcgggggcgggggcccggtgcggcccgggggggaaaatagggcggatcccccccagtcgtacaggggattttccgcctcaatgtacggggaggccggcgctgcattcgccgtgttcacgcagacgttttcgtagacccgcatccatggtatttcctcgtagacacgccccccgtcctcgctcaccgtctcgtatattgactcgtcgtcctcgtagggggcgtgccgttcgcgggccgaggcggcgtgggtggctttgcggcgggcgtcgtcgtcgtcgtcgtcggccgtcagatacgtggcttccatctggtcgggttctccctccggggcgggtccccacacccgtggccgatcgaggctccccagagacgcgcgccggacgaggagggggcacgtcgccgccggcggtcgcctgtcgggtcccgcgacgttacgggccgggaggcgcgggggcacctcccccatgtgcgtgtaatacgtggccggctgtgtggccgcagcggggggctcggcgaccgggtcgttcgcatccggaagcgggggccccgcgccgtccgcgcggcgcctccggaacctccgggtggacgcgggggtcgagtgtaggcgaggtcgggggaggggcgggggctcgttgtcgcgccgcgcccgctgaatcttttcccgacaggtcccaccccccgcgcgatgcccccccgggccgctggccatgtcgtccgggggaggccccgcggaccacgtcgtccggcgagacgccacgagccgcaggatggactcgtagtggagcgacggcgccccgttgcggagcagatccgcggccagggcggccccgaaccaagccttgatgctcaactccatccgggcccagctgggggcggtcatcgtggggaacaggggggcggtggtccgacagaaacgctcctggctgtccaccgcggcccgcagatactcgttgttcaggctgtcggtggcccagacgccgtacccggtgagggtcgcgttgatgatatactgggcgtggtgatggacgatcgacagaacctccaccgtggatacgacggtatccacggtcccgtacgtaccgccgctccgcttgccggtctgccacaggttggctaggcgcgtcaggtggcccaggacgtcgctgaccgccgccctgagcgccatgcactgcatggagccggtcgtgccgctgggaccccggtccagatggcgcgcgaacgtttccgcgggcgcctccgggctgccgccgagcgggaggaaccggcgattggagggactcagccggtgacatacgtgcttgtccgtcgtccacagcatccaggacgcccaccggtacagcacggagacgtaggccaggagctcgttgagccgcagtgcggtgtcggtgctggggcggcttgggtccgccgggcgcataaagaacatgtactgctgaatccgatggagggcgtcgcgcaggccggccacggtggcggcgtacttggccgccacggccccgctcttgaacggggtgcgcgccagcagctttggcgccagggtgggccgcagcagcacgtgaaggctggggtcgcagtcgcccacggggtcctcggggacgtccaggccgctgggcaccaccgtctgcaggtacttccagtactgcgtgaggatggcgcggctcaactggccgccgggcagctccacctcgcccagcgcctgggtggcggccgaagcgtagtgccggatgtactcgtagtgcgggtcgctggcgagcccgtccacgatcaaactctcgggaaccgtgttgtgttgccgcgcggccaaccggacgctgcgatcggtgcaggtcagaaacgccggctgcgcgtcgtcggagcgctgccgcaaggcgcccacggccgcgctaaggagcccctccggggtggggagcagacacccgccgaagatgcgccgctcgggaacgcccgcgttgtcgccgcggatcaggttggcaggcgtcaggcaccgcgccagccgcagggagctcgcgccgcgcgtccggcgctgcatggtgacgcccgttcggtcgggacccgccggtcggagttatgccgcgtccagggccatcggggcgctttttatcgggaggagcttatgggcgtggcgggcctcccagcccggtcgcgcgcctccccgacacgtgcgcccgcagggcggcggccccctcgtctcccatcagcagtttcctaaactgggacatgatgtccaccacgcggacccgcgggcccaacacggacccgccgcttacgggggcgggggggaagggctccaggtccttgagaagaaaggcggggtctgccgtcccggacacgggggcccggggcgctgaggaggcggggcgcagatccacgtgctccgcggccgcgcggacgtccgcccagaacttggcgggggtggtgcgcgcgtacaggggctgggtcgctcggaggacgcacgcgtagcgcaggggggtgtacgtgcccacctcgggggccgtgaatcccccgtcaaacgcggccagtgtcacgcacgccaccacggtgtcggcaaagcccagcagccgctgcaggacgagcccggcggccagaatggcgcgcgtggccgccgcgtcgtcccggcgccggtgcgcgtccccgcacgcccgggcgtactttaaggtcacggtcgccagggccgtgtgcagcgcgtacaccgcagcgcccagcacggcgttgagcccgctgttggcgagcagccggcgcgctgcggtgtcgcccagcgcctcgtgctcggcccccacgaccgcggggcttcccaggggcagggcgcgaaacagctcctcccgcgccacgtccgcaaaggcggggtggtgcacgtgcgggtgcaggcgcgcccccacgaccaccgagagccactggaccgtctgctccgccatcaccgccagcacatccagcacgcgccccaggaaggcggcctcccgcgtcaaaacgcaccggacggcgtcgggattgaagcgggcgagcagggccccggtggccaggtacgtcatgcggccggcatagcgggcggccacgcgacagtcgcggtccagcagcgcgcgcaccccgggccagtacagcagggaccccagcgagctgcggaacaccgcggcgtcggggccggattggggggacactaacccccccgcgctcagtaacggcacggccgcggccccgacgggacgcaacgccgtgaggctcgcgaactgccgcctcagctcggccgccctgtcgtccaggtcagacccgcgcgcctccgcgtgaaggcgcgtcccgcacacccacccgttgatggccagccgcacgacggcatccgccaaaaagctcatcgcctgggcggggctggtttttgttcgacgatccgtcaggtcaagaatcccatcgcccgtgatataccaggccaacgcctcgccctgctgcagggtttggcggaaaaacaccgcggggttgtcgggggaggcgaagtgcatgacccccacgcgcgataacccgaacgcgctatccggacacgggtaaaacccggccggatgccccagggctagggcggagcgcacggactcgtcccacacggcaacctgaggggccagtcgatccaacgggaatgccgcccggagctccgggcccggcacgcgtccctccagaacctccaccttgggcggggaacgggccccgccgccgtcctccggcccgacggcttccgggtagtcgtcctcctcgtactgcagctcctctaggaacagcggcgacggcgccacccgcgaaccgccgacccgccccaaaatagcccgcgcgtcatcgaattcctgcagcccgggggatcctctagagtcgacctgcaggcatgcaagcttgagtattctatagtgtcacctaaatagcttggcgtaatcatggtcatagctgtttcctgtgtgaaattgttatccgctcacaattccacacaacatacgagccggaagcataaagtgtaaagcctggggtgcctaatgagtgagctaactcacattaattgcgttgcgctcactgcccgctttccagtcgggaaacctgtcgtgccagctgcattaatgaatcggccaacgcgaaccccttgcggccgcccgggccgtcgaccaattctcatgtttgacagcttatcatcgaatttctgccattcatccgcttattatcacttattcaggcgtagcaaccaggcgtttaagggcaccaataactgccttaaaaaaattacgccccgccctgccactcatcgcagtactgttgtaattcattaagcattctgccgacatggaagccatcacaaacggcatgatgaacctgaatcgccagcggcatcagcaccttgtcgccttgcgtataatatttgcccatggtgaaaacgggggcgaagaagttgtccatattggccacgtttaaatcaaaactggtgaaactcacccagggattggctgagacgaaaaacatattctcaataaaccctttagggaaataggccaggttttcaccgtaacacgccacatcttgcgaatatatgtgtagaaactgccggaaatcgtcgtggtattcactccagagcgatgaaaacgtttcagtttgctcatggaaaacggtgtaacaagggtgaacactatcccatatcaccagctcaccgtctttcattgccatacggaattccggatgagcattcatcaggcgggcaagaatgtgaataaaggccggataaaacttgtgcttatttttctttacggtctttaaaaaggccgtaatatccagctgaacggtctggttataggtacattgagcaactgactgaaatgcctcaaaatgttctttacgatgccattgggatatatcaacggtggtatatccagtgatttttttctccattttagcttccttagctcctgaaaatctcgataactcaaaaaatacgcccggtagtgatcttatttcattatggtgaaagttggaacctcttacgtgccgatcaacgtctcattttcgccaaaagttggcccagggcttcccggtatcaacagggacaccaggatttatttattctgcgaagtgatcttccgtcacaggtatttattcgcgataagctcatggagcggcgtaaccgtcgcacaggaaggacagagaaagcgcggatctgggaagtgacggacagaacggtcaggacctggattggggaggcggttgccgccgctgctgctgacggtgtgacgttctctgttccggtcacaccacatacgttccgccattcctatgcgatgcacatgctgtatgccggtataccgctgaaagttctgcaaagcctgatgggacataagtccatcagttcaacggaagtctacacgaaggtttttgcgctggatgtggctgcccggcaccgggtgcagtttgcgatgccggagtctgatgcggttgcgatgctgaaacaattatcctgagaataaatgccttggcctttatatggaaatgtggaactgagtggatatgctgtttttgtctgttaaacagagaagctggctgttatccactgagaagcgaacgaaacagtcgggaaaatctcccattatcgtagagatccgcattattaatctcaggagcctgtgtagcgtttataggaagtagtgttctgtcatgatgcctgcaagcggtaacgaaaacgatttgaatatgccttcaggaacaatagaaatcttcgtgcggtgttacgttgaagtggagcggattatgtcagcaatggacagaacaacctaatgaacacagaaccatgatgtggtctgtccttttacagccagtagtgctcgccgcagtcgagcgacagggcgaagccctcgagttaattaactcgagtgagcgaggaagcaccagggaacagcacttatatattctgcttacacacgatgcctgaaaaaacttcccttggggttatccacttatccacggggatatttttataattattttttttatagtttttagatcttcttttttagagcgccttgtaggcctttatccatgctggttctagagaaggtgttgtgacaaattgccctttcagtgtgacaaatcaccctcaaatgacagtcctgtctgtgacaaattgcccttaaccctgtgacaaattgccctcagaagaagctgttttttcacaaagttatccctgcttattgactcttttttatttagtgtgacaatctaaaaacttgtcacacttcacatggatctgtcatggcggaaacagcggttatcaatcacaagaaacgtaaaaatagcccgcgaatcgtccagtcaaacgacctcactgaggcggcatatagtctctcccgggatcaaaaacgtatgctgtatctgttcgttgaccagatcagaaaatctgatggcaccctacaggaacatgacggtatctgcgagatccatgttgctaaatatgctgaaatattcggattgacctctgcggaagccagtaaggatatacggcaggcattgaagagtttcgcggggaaggaagtggttttttatcgccctgaagaggatgccggcgatgaaaaaggctatgaatcttttccttggtttatcaaacgtgcgcacagtccatccagagggctttacagtgtacatatcaacccatatctcattcccttctttatcgggttacagaaccggtttacgcagtttcggcttagtgaaacaaaagaaatcaccaatccgtatgccatgcgtttatacgaatccctgtgtcagtatcgtaagccggatggctcaggcatcgtctctctgaaaatcgactggatcatagagcgttaccagctgcctcaaagttaccagcgtatgcctgacttccgccgccgcttcctgcaggtctgtgttaatgagatcaacagcagaactccaatgcgcctctcatacattgagaaaaagaaaggccgccagacgactcatatcgtattttccttccgcgatatcacttccatgacgacaggatagtctgagggttatctgtcacagatttgagggtggttcgtcacatttgttctgacctactgagggtaatttgtcacagttttgctgtttccttcagcctgcatggattttctcatactttttgaactgtaatttttaaggaagccaaatttgagggcagtttgtcacagttgatttccttctctttcccttcgtcatgtgacctgatatcgggggttagttcgtcatcattgatgagggttgattatcacagtttattactctgaattggctatccgcgtgtgtacctctacctggagtttttcccacggtggatatttcttcttgcgctgagcgtaagagctatctgacagaacagttcttctttgcttcctcgccagttcgctcgctatgctcggttacacggctgcggcgagcgctagtgataataagtgactgaggtatgtgctcttcttatctccttttgtagtgttgctcttattttaaacaactttgcggttttttgatgactttgcgattttgttgttgctttgcagtaaattgcaagatttaataaaaaaacgcaaagcaatgattaaaggatgttcagaatgaaactcatggaaacacttaaccagtgcataaacgctggtcatgaaatgacgaaggctatcgccattgcacagtttaatgatgacagcccggaagcgaggaaaataacccggcgctggagaataggtgaagcagcggatttagttggggtttcttctcaggctatcagagatgccgagaaagcagggcgactaccgcacccggatatggaaattcgaggacgggttgagcaacgtgttggttatacaattgaacaaattaatcatatgcgtgatgtgtttggtacgcgattgcgacgtgctgaagacgtatttccaccggtgatcggggttgctgcccataaaggtggcgtttacaaaacctcagtttctgttcatcttgctcaggatctggctctgaaggggctacgtgttttgctcgtggaaggtaacgacccccagggaacagcctcaatgtatcacggatgggtaccagatcttcatattcatgcagaagacactctcctgcctttctatcttggggaaaaggacgatgtcacttatgcaataaagcccacttgctggccggggcttgacattattccttcctgtctggctctgcaccgtattgaaactgagttaatgggcaaatttgatgaaggtaaactgcccaccgatccacacctgatgctccgactggccattgaaactgttgctcatgactatgatgtcatagttattgacagcgcgcctaacctgggtatcggcacgattaatgtcgtatgtgctgctgatgtgctgattgttcccacgcctgctgagttgtttgactacacctccgcactgcagtttttcgatatgcttcgtgatctgctcaagaacgttgatcttaaagggttcgagcctgatgtacgtattttgcttaccaaatacagcaatagtaatggctctcagtccccgtggatggaggagcaaattcgggatgcctggggaagcatggttctaaaaaatgttgtacgtgaaacggatgaagttggtaaaggtcagatccggatgagaactgtttttgaacaggccattgatcaacgctcttcaactggtgcctggagaaatgctctttctatttgggaacctgtctgcaatgaaattttcgatcgtctgattaaaccacgctgggagattagataatgaagcgtgcgcctgttattccaaaacatacgctcaatactcaaccggttgaagatacttcgttatcgacaccagctgccccgatggtggattcgttaattgcgcgcgtaggagtaatggctcgcggtaatgccattactttgcctgtatgtggtcgggatgtgaagtttactcttgaagtgctccggggtgatagtgttgagaagacctctcgggtatggtcaggtaatgaacgtgaccaggagctgcttactgaggacgcactggatgatctcatcccttcttttctactgactggtcaacagacaccggcgttcggtcgaagagtatctggtgtcatagaaattgccgatgggagtcgccgtcgtaaagctgctgcacttaccgaaagtgattatcgtgttctggttggcgagctggatgatgagcagatggctgcattatccagattgggtaacgattatcgcccaacaagtgcttatgaacgtggtcagcgttatgcaagccgattgcagaatgaatttgctggaaatatttctgcgctggctgatgcggaaaatatttcacgtaagattattacccgctgtatcaacaccgccaaattgcctaaatcagttgttgctcttttttctcaccccggtgaactatctgcccggtcaggtgatgcacttcaaaaagcctttacagataaagaggaattacttaagcagcaggcatctaaccttcatgagcagaaaaaagctggggtgatatttgaagctgaagaagttatcactcttttaacttctgtgcttaaaacgtcatctgcatcaagaactagtttaagctcacgacatcagtttgctcctggagcgacagtattgtataagggcgataaaatggtgcttaacctggacaggtctcgtgttccaactgagtgtatagagaaaattgaggccattcttaaggaacttgaaaagccagcaccctgatgcgaccacgttttagtctacgtttatctgtctttacttaatgtcctttgttacaggccagaaagcataactggcctgaatattctctctgggcccactgttccacttgtatcgtcggtctgataatcagactgggaccacggtcccactcgtatcgtcggtctgattattagtctgggaccacggtcccactcgtatcgtcggtctgattattagtctgggaccacggtcccactcgtatcgtcggtctgataatcagactgggaccacggtcccactcgtatcgtcggtctgattattagtctgggaccatggtcccactcgtatcgtcggtctgattattagtctgggaccacggtcccactcgtatcgtcggtctgattattagtctggaaccacggtcccactcgtatcgtcggtctgattattagtctgggaccacggtcccactcgtatcgtcggtctgattattagtctgggaccacgatcccactcgtgttgtcggtctgattatcggtctgggaccacggtcccacttgtattgtcgatcagactatcagcgtgagactacgattccatcaatgcctgtcaagggcaagtattgacatgtcgtcgtaacctgtagaacggagtaacctcggtgtgcggttgtatgcctgctgtggattgctgctgtgtcctgcttatccacaacattttgcgcacggttatgtggacaaaatacctggttacccaggccgtgccggcacgttaaccgggctgcatccgatgcaagtgtgtcgctgtcgacgagctcgcgagctcggacatgaggttgccccgtattcagtgtcgctgatttgtattgtctgaagttgtttttacgttaagttgatgcagatcaattaatacgatacctgcgtcataattgattatttgacgtggtttgatggcctccacgcacgttgtgatatgtagatgataatcattatcactttacgggtcctttccggtgatccgacaggttacggggcggcgacctcgcgggttttcgctatttatgaaaattttccggtttaaggcgtttccgttcttcttcgtcataacttaatgtttttatttaaaataccctctgaaaagaaaggaaacgacaggtgctgaaagcgagctttttggcctctgtcgtttcctttctctgtttttgtccgtggaatgaacaatggaagtccgagctcatcgctaataacttcgtatagcatacattatacgaagttatattcgatgcggccgcaaggggttcgcgtcagcgggtgttggcgggtgtcggggctggcttaactatgcggcatcagagcagattgtactgagagtgcaccatatgcggtgtgaaataccgcacagatgcgtaaggagaaaataccgcatcaggcgccattcgccattcaggctgcgcaactgttgggaagggcgatcggtgcgggcctcttcgctattacgccagctggcgaaagggggatgtgctgcaaggcgattaagttgggtaacgccagggttttcccagtcacgacgttgtaaaacgacggccagtgaattgtaatacgactcactatagggcgaattcgagctcggtacccggggatcccccccagtcgtacaggggattttccgcctcaatgtacggggaggccggcgctgcattcgccgtgttcacgcagacgttttcgtagacccgcatccatggtatttcctcgtagacacgccccccgtcctcgctcaccgtctcgtatattgactcgtcgtcctcgtagggggcgtgccgttcgcgggccgaggcggcgtgggtggctttgcggcgggcgtcgtcgtcgtcgtcgtcggccgtcagatacgtggcttccatctggtcgggttctccctccggggcgggtccccacacccgtggccgatcgaggctccccagagacgcgcgccggacgaggagggggcacgtcgccgccggcggtcgcctgtcgggtcccgcgacgttacgggccgggaggcgcgggggcacctcccccatgtgcgtgtaatacgtggccggctgtgtggccgcagcggggggctcggcgaccgggtcgttcgcatccggaagcgggggccccgcgccgtccgcgcggcgcctccggaacctccgggtggacgcgggggtcgagtgtaggcgaggtcgggggaggggcgggggctcgttgtcgcgccgcgcccgctgaatcttttcccgacaggtcccaccccccgcgcgatgcccccccgggccgctggccatgtcgtccgggggaggccccgcggaccacgtcgtccggcgagacgccacgagccgcaggatggactcgtagtggagcgacggcgccccgttgcggagcagatccgcggccagggcggccccgaaccaagccttgatgctcaactccatccgggcccagctgggggcggtcatcgtggggaacaggggggcggtggtccgacagaaacgctcctggctgtccaccgcggcccgcagatactcgttgttcaggctgtcggtggcccagacgccgtacccggtgagggtcgcgttgatgatatactgggcgtggtgatggacgatcgacagaacctccaccgtggatacgacggtatccacggtcccgtacgtaccgccgctccgcttgccggtctgccacaggttggctaggcgcgtcaggtggcccaggacgtcgctgaccgccgccctgagcgccatgcactgcatggagccggtcgtgccgctgggaccccggtccagatggcgcgcgaacgtttccgcgggcgcctccgggctgccgccgagcgggaggaaccggcgattggagggactcagccggtgacatacgtgcttgtccgtcgtccacagcatccaggacgcccaccggtacagcacggagacgtaggccaggagctcgttgagccgcagtgcggtgtcggtgctggggcggcttgggtccgccgggcgcataaagaacatgtactgctgaatccgatggagggcgtcgcgcaggccggccacggtggcggcgtacttggccgccacggccccgctcttgaacggggtgcgcgccagcagctttggcgccagggtgggccgcagcagcacgtgaaggctggggtcgcagtcgcccacggggtcctcggggacgtccaggccgctgggcaccaccgtctgcaggtacttccagtactgcgtgaggatggcgcggctcaactggccgccgggcagctccacctcgcccagcgcctgggtggcggccgaagcgtagtgccggatgtactcgtagtgcgggtcgctggcgagcccgtccacgatcaaactctcgggaaccgtgttgtgttgccgcgcggccaaccggacgctgcgatcggtgcaggtcagaaacgccggctgcgcgtcgtcggagcgctgccgcaaggcgcccacggccgcgctaaggagcccctccggggtggggagcagacacccgccgaagatgcgccgctcgggaacgcccgcgttgtcgccgcggatcaggttggcaggcgtcaggcaccgcgccagccgcagggagctcgcgccgcgcgtccggcgctgcatggtgacgcccgttcggtcgggacccgccggtcggagttatgccgcgtccagggccatcggggcgctttttatcgggaggagcttatgggcgtggcgggcctcccagcccggtcgcgcgcctccccgacacgtgcgcccgcagggcggcggccccctcgtctcccatcagcagtttcctaaactgggacatgatgtccaccacgcggacccgcgggcccaacacggacccgccgcttacgggggcgggggggaagggctccaggtccttgagaagaaaggcggggtctgccgtcccggacacgggggcccggggcgctgaggaggcggggcgcagatccacgtgctccgcggccgcgcggacgtccgcccagaacttggcgggggtggtgcgcgcgtacaggggctgggtcgctcggaggacgcacgcgtagcgcaggggggtgtacgtgcccacctcgggggccgtgaatcccccgtcaaacgcggccagtgtcacgcacgccaccacggtgtcggcaaagcccagcagccgctgcaggacgagcccggcggccagaatggcgcgcgtggccgccgcgtcgtcccggcgccggtgcgcgtccccgcacgcccgggcgtactttaaggtcacggtcgccagggccgtgtgcagcgcgtacaccgcagcgcccagcacggcgttgagcccgctgttggcgagcagccggcgcgctgcggtgtcgcccagcgcctcgtgctcggcccccacgaccgcggggcttcccaggggcagggcgcgaaacagctcctcccgcgccacgtccgcaaaggcggggtggtgcacgtgcgggtgcaggcgcgcccccacgaccaccgagagccactggaccgtctgctccgccatcaccgccagcacatccagcacgcgccccaggaaggcggcctcccgcgtcaaaacgcaccggacggcgtcgggattgaagcgggcgagcagggccccggtggccaggtacgtcatgcggccggcatagcgggcggccacgcgacagtcgcggtccagcagcgcgcgcaccccgggccagtacagcagggaccccagcgagctgcggaacaccgcggcgtcggggccggattggggggacactaacccccccgcgctcagtaacggcacggccgcggccccgacgggacgcaacgccgtgaggctcgcgaactgccgcctcagctcggccgccctgtcgtccaggtcagacccgcgcgcctccgcgtgaaggcgcgtcccgcacacccacccgttgatggccagccgcacgacggcatccgccaaaaagctcatcgcctgggcggggctggtttttgttcgacgatccgtcaggtcaagaatcccatcgcccgtgatataccaggccaacgcctcgccctgctgcagggtttggcggaaaaacaccgcggggttgtcgggggaggcgaagtgcatgacccccacgcgcgataacccgaacgcgctatccggacacgggtaaaacccggccggatgccccagggctagggcggagcgcacggactcgtcccacacggcaacctgaggggccagtcgatccaacgggaatgccgcccggagctccgggcccggcacgcgtccctccagaacctccaccttgggcggggaacgggccccgccgccgtcctccggcccgacggcttccgggtagtcgtcctcctcgtactgcagctcctctaggaacagcggcgacggcgccacccgcgaaccgccgacccgccccaaaatagcccgcgcgtcgacgggacccaggtatcccccctgccgggcctgcggaggaccgcggggaacctcatcatcatcgtccaggcgaccgcgcaccgactggctacgggccgcatcgggcccggggcgctgccgggacgctcggcgatgggatgtgggcggggcttccgacgcgcgccgtcgtcgggctcgcgggccttcccgtcgacggcgcacgggcggctcgtcgcccgccatctcctccagagcctctagctcgctgtcgtcatccccgcggaacaccgcacgcaggtaccccatgaaccccaccccatcgcccgctggctcgtccgccacgggcgaggcgcgggggcgggtggatgcgcgcctcctgcgccccgcgggttcgcgagccgacatggtggcgatagacgcgggttatcggatgtccgctaccccccaaaaaagaaaaagaccccacagcgcggatggaggccggggtaggtgccgccggaccccctcgcgatgggaatggacgggagcgacggggccggcgcaaaaaaacgcagtatctcccgcgaaggctacccgccgccccagcccccggccaaatgcggaaacggtcccgcgctctcgcctttatacgcgggccgccctgcgacacaatcacccgtccgtggtttcgaatctacacgacaggcccgcagacgcggctaacacacacgccggcaacccagaccccagtgggttggttgcgcggtcccgtctcctggctagttctttcccccaccaccaaataatcagacgacaaccgcaggttttgtaatgtatgtgctcgtgtttattgtggatacgaaccggtgacgggaggggaaaacccagacgggggatgcgggtccggtcgcgccccctacccaccgtactcgtcaattccaagggcatcggtaaacatctgctcaaactcgaagtcggccatatccagagcgccgtagggggcggagtcgtggggggtaaatcccggccccggggaatccccgtcccccaacatgtccagatcgaaatcgtctagcgcgtcggcatgcgccatcgccacgtcctcgccgtctaagtggagctcgtcccccaggctgacatcggtcgggggggccgtcgacagtctgcgcgtgtgtcccgcggggagaaaggacaggcgcggagccgccagccccgcctcttcgggggcgtcgtcgtccgggagatcgagcaggccctcgatggtagacccgtaattgtttttcgtacgcgcgcggctgtacgcgtgttcccgcatgaccgcctcggagggcgaggtcgtgaagctggaatacgagtccaacttcgcccgaatcaacaccataaagtacccagaggcgcgggcctggttgccatgcagggtgggaggggtcgtcaacggcgcccctggctcctccgtagccgcgctgcgcaccagcgggaggttaaggtgctcgcgaatgtggtttagctcccgcagccggcgggcctcgattggcactccccggacggtgagcgctccgttgacgaacatgaagggctggaacagacccgccaactgacgccagctctccaggtcgcaacagaggcagtcaaacaggtcgggccgcatcatctgctcggcgtacgcggcccataggatctcgcgggtcaaaaatagatacaaatgcaaaaacaaaacacgcgccagacgagcggtctctcggtagtacctgtccgcgatcgtggcgcgcagcatttctcccaggtcgcgatcgcgtccgcgcatgtgcgcctggcggtgcagctgccggacgctggcgcgcaggtaccggtacagggccgagcagaagttggccaacacggttcgatagctctcctcccgcgcccgtagctcggcgtggaagaaacgagagagcgcttcgtagtagagcccgaggccgtcgcgggtggccggaagcgtagggaaggccacgtcgccgtgggcgcgaatgtcgatttgggtgcgttcggggacgtacgcgtccccccattccaccacatcgctgggcagcgttgataggaatttacactcccggtacaggtcggcgttggtcggtagcgccgaaaacagatcctcgttccaggtatcgagcatggtacatagcgcggggcccgcgctaaagcccaagtcgtcgaggagacggttaaagagggcggcgggggggacgggcatgggtggggagggcatgagctgggcctggctcaggcgccccgttgcgtacagcgggggggccgccggggtgtttttgggacccccggccgggcgggggggcggtggcgaagcgccgtccgcgttcatgtcggcaaacagctcgtcgaccaagaggtccattgggtggggttgatacgggaaagacgatatcgggcttttgatgcgatcgtccccgcccgcccagagagtgtgggacgcccgacggcgcgggaagagaaaacccccaaacgcgttagaggaccggacggaccttatggggggaagtgggcagcgggaaccccgtccgttcccgaggaatgacagcccgtggtcgccaccacgcatttaagcaacccgcacgggccgccccgtacctcgtgacttccccccacattggctcctgtcacgtgaaggcgaaccgagggcggctgtccaacccaccccccgccacccagtcccggtccccgtcggattgggaaacaaaggcacgcaacgccaacaccgaatgaacccctgttggtgctttattgtctgggtacggaagttttcactcgacgggccgtctggggcgagaagcggagcgggctggggctcgaggtcgctcggtggggcgcgacgccgcagaacgccctcgagtcgccgtggccgcgtcgacgtcctgcaccacgtctggattcaccaactcgttggcgcgctgaagcaggtttttgccctcgcagaccgtcacgcggatggtggtgatgccaaggagttcgttgaggtcttcgtctgtgcgcggacgcgacatgtcccagagctggaccgccgccatccgggcatgcatggccgccaggcgcccgaccgcggcgcagaagacgcgcttgttaaagccggccacccggggggtccatggcgcgtcggggtttgggggggcggtgctaaagtgcagctttctggccagcccctgcgcgggtgtcttggatcgggttggcgccgtcgacgcgggggcgtctgggagtgcggcggattctggctgggccgatttcctgccgcgggtggtctccgccgccggggccgcgggggccttagtcgccacccgctgggttcggggggcccggggggcggtggtgggtgtgcgtccggcccctccggacccagcgggtggcggaggcgcccgcgcaggccccgggccggacaaaaccgccccggaaacgggacgccgcgtccgggggacctccgggtgttcgtcgtcttcggatgacgagcccccgtagagggcataatccgactcgtcgtactggacgaaacggacctcgcccctctggcgcgagcgtgtctgtagggcgccacggcgggaggtgtcaggcggactatcgggactcgccatacctgaagacggggtgtagtacagatcctcgtactcatcgcgcggaacctcccgcggacccgacttcacggagcggcgagaggtcatggttccacgaacacgctagggtcggatgcgcggacaattaggcctgggttcggacggcgggggtggtgcaggtgtggagaggtcgagcgataggggcggcccgggagagaagagagggtccgcaaaacccactggggatgcgtgagtggccctctgtgggcggtgggggagagtcttataggaagtgcatataaccacaacccatgggtctaaccaatccccaggggccaagaaacagacacgccccaaacggtctcggtttccgcgaggaaggggaagtcctgggacaccctccacccccacccctcaccccacacagggcgggttcaggcgtgcccggcagccagtagcctctggcagatctgacagacgtgtgcgataatacacacgcccatcgaggccatgcctacataaaagggcaccagggcccccggggcagacatttggccagtgttttgggtctcgcaccgcgcgcccccgatcccatcgcgcccgccctcctcgccgggcggctccccgcgcgggcccgcgtctcccgccgctaaggcgacgagcaagacaaacaacaggcccgcccgacagacccttctgggggggcccatcgtccctaacaggaagatgagtcagtggggatccggggcgatccttgtccagccggacagcttgggtcgggggtacgatggcgactggcacacggccgtcgctactcgcgggggcggagtcgtgcaactgaacctggtcaacaggcgcgcggtggcttttatgccgaaggttagcggggactccggatgggccgtcgggcgcgtctctctggacctgcgaatggctatgccggctgacttttgcgcgattattcacgcccccgcgctagccagccccgggcaccacgtaatactgggtcttatcgactcggggtaccgcggaaccgttatggccgtggtcgtagcgcctaaaaggacgcgggaatttgcccccgggaccctgcgggtcgacgtgacgttcctggacatcctggcgacccccccggccctcaccgagccgatttccctgcggcagttcccgcaactggcgcccccccctccaaccggggccgggatacgcgaagatccttggttggagggggcgctcggggccccaagcgtgactacggccctaccggcgcgacgccgagggcggtccctcgtctatgccggcgagctgacgccggttcagacggaacacggggacggcgtacgagaagccatcgccttccttccaaaacgcgaggaggatgccggtttcgacattgtcgtccgtcgcccggtcaccgtcccggcaaacggcaccacggtcgtgcagccatccctccgcatgctccacgcggacgccgggcccgcggcctgctatgtgttggggcggtcgtcgctcaacgcccgcggcctcctggtcgttcctacgcgctggctccccgggcacgtatgtgcgtttgttgtttacaaccttacgggggttcctgtgaccctcgaggccggcgccaaggtcgcccagctcctggttgcgggggcggacgctcttccttggatccccccggacaactttcacgggaccaaagcgcttcgaaactaccccaggggtgttccggactcaaccgccgaacccaggaacccgccgctcctggtgtttacgaacgagtttgacgcggaggcccccccgagcgagcgcgggaccgggggttttggttctaccggtatttagcccacagctttgggttcgttccgggcaataaaaaacgtttgtatcgcatctttcctgtgtgtagttgtttatgttggatgcctgtgggtctatcacacccgcccctccatcccacaaacacaaaacacacgggttggatgaaaacacgcatttattgacccaaaacacacggagctgctcgagatgggccagggcgaggtgcggttggggaggctgtaggtctgggaacggacacgcggggacacgattccggtttggggtccgggagggcgtcgccgtttcgggcggcaggcgccagcgtaacctccgggggcggcgtgtgggggtgccccaaggagggcgcctcggtcaccccaatcccccccgaccgggttcccccggcaaccccgaaggcggagaggccaagggcccgttcggcgatggccacatcctccatgaccacgtcactctcggccatgctccgaatagcctgggagacgagcacatccgcggacttgtcagccgcccccacggacatgtacatctgcaggatggtggccatacacgtgtccgccaggcgccgcatcttgtcctgatgggccgccacggccccgtcgatcgtgggggcctcgaacccggggtggtggcgcgccagtcgttctaggttcaccatgcaggcgtggtacgtgcgggccaaggcgcgggccttcacgaggcgtcgggtgtcgtccagggaccccagggcgtcatcgagcgtgatgggggcgggaagtagcgcgttaacgaccgccagggcctcctgcagccgcggctccgcctccgagggcggaacggccgcgcggatcatctcatattgttcctcggggcgcgctccccagccacatatagccccgagaagagaagccatcgcgggcgggtactggcccttgggcgcgcggacgcaatggggcaggaagacgggaaccgcggggagaggcgggcggccgggactcccgtggaggtgaccgcgctttatgcgaccgacgggtgcgttattacctcttcgatcgccctcctcacaaactctctactgggggccgagccggtttatatattcagctacgacgcatacacgcacgatggccgtgccgacgggcccacggagcaagacaggttcgaagagagtcgggcgctctaccaagcgtcgggcgggctaaatggcgactccttccgagtaaccttttgtttattggggacggaagtgggtgggacccaccaggcccgcgggcgaacccgacccatgttcgtctgtcgcttcgagcgagcggacgacgtcgccgcgctacaggacgccctggcgcacgggaccccgctacaaccggaccacatcgccgccaccctggacgcggaggccacgttcgcgctgcatgcgaacatgatcctggctctcaccgtggccatcaacaacgccagcccccgcaccggacgcgacgccgccgcggcgcagtatgatcagggcgcgtccctacgctcgctcgtggggcgcacgtccctgggacaacgcggccttaccacgctatacgtccaccacgaggtgcgcgtgcttgccgcgtaccgcagggcgtattatggaagcgcgcagagtcccttctggtttcttagcaaattcgggccggacgaaaaaagcctggtgctcaccactcggtactacctgcttcaggcccagcgtctggggggcgcgggggccacgtacgacctgcaggccatcaaggacatctgcgccacctacgcgattccccacgccccccgccccgacaccgtcagcgctgcgtccctgacctcgtttgccgccatcacgcggttctgttgcacgagccagtacgcccgcggggccgcggcggccgggtttccgctttacgtggagcgccgtattgcggccgacgtccgcgagaccagtgcgctggagaagttcataacccacgatcgcagttgcctgcgcgtgtccgaccgtgaattcattacgtacatctacctggcccattttgagtgtttcagccccccgcgcctagccacgcatcttcgggccgtgacgacccacgaccccaaccccgcggccagcacggagcagccctcgcccctgggcagggaggccgtggaacaatttttttgtcacgtgcgcgcccaactgaatatcggggagtacgtcaaacacaacgtgaccccccgggagaccgtcctggatggcgatacggccaaggcctacctgcgcgctcgcacgtacgcgcccggggccctgacgcccgcccccgcgtattgcggggccgtggactccgccaccaaaatgatggggcgtttggcggacgccgaaaagctcctggtcccccgcgggtggcccgcgtttgcgcccgccagtcccggggaggacacggcgggcggcacgccgcccccacagacctgcggaattgtcaagcgcctcctgagactggccgccacggaacagcagggccccacacccccggcgatcgcggcgcttatccgtaatgcggcggtgcagactcccctgcccgtctaccggatatccatggtccccacgggacaggcatttgccgcgctggcctgggacgactgggcccgcataacgcgggacgctcgcctggccgaagcggtcgtgtccgccgaagcggcggcgcaccccgaccacggcgcgctgggcaggcggctcacggatcgcatccgcgcccagggccccgtgatgccccctggcggcctggatgccggggggcagatgtacgtgaatcgcaacgagatattcaacggcgcgctggcaatcacaaacatcatcctggatctcgacatcgccctgaaggagcccgtcccctttcgccggctccacgaggccctgggccactttaggcgcggggctctggctgcggttcagctcctgtttcccgcggcccgcgtggaccccgacgcatatccctgttattttttcaaaagcgcatgtcggcccggcccggcgtccgtgggttccggcagcggactcggcaacgacgacgacggggactggtttccctgctacgacgacgccggtgatgaggagtgggcggaggacccgggcgccatggacacatcccacgatcccccggacgacgaggttgcctactttgacctgtgccacgaagtcggccccacggcggaacctcgcgaaacggattcgcccgtgtgttcctgcaccgacaagatcggactgcgggtgtgcatgcccgtccccgccccgtacgtcgtccacggttctctaacgatgcggggggtggcacgggtcatccagcaggcggtgctgttggaccgagattttgtggaggccatcgggagctacgtaaaaaacttcctgttgatcgatacgggggtgtacgcccacggccacagcctgcgcttgccgtattttgccaaaatcgcccccgacgggcctgcgtgcggaaggctgctgccagtgtttgtgatcccccccgcctgcaaagacgttccggcgtttgtcgccgcgcacgccgacccgcggcgcttccattttcacgccccgcccacctatctcgcttccccccgggagatccgtgtcctgcacagcctgggtggggactatgtgagcttctttgaaaggaaggcgtcccgcaacgcgctggaacactttgggcgacgcgagaccctgacggaggtcctgggtcggtacaacgtacagccggatgcgggggggaccgtcgaggggttcgcatcggaactgctggggcggatagtcgcgtgcatcgaaacccactttcccgaacacgccggcgaatatcaggccgtatccgtccggcgggccgtcagtaaggacgactgggtcctcctacagctagtccccgttcgcggtaccctgcagcaaagcctgtcgtgtctgcgctttaagcacggccgggcgagtcgcgccacggcgcggacattcgtcgcgctgagcgtcggggccaacaaccgcctgtgcgtgtccttgtgtcagcagtgctttgccgccaaatgcgacagcaaccgcctgcacacgctgtttaccattgacgccggcacgccatgctcgccgtccgttccctgcagcacctctcaaccgtcgtcttgataacggcgtacggcctcgtgctcgtgtggtacaccgtcttcggtgccagtccgctgcaccgatgtatttacgcggtacgccccaccggcaccaacaacgacaccgccctcgtgtggatgaaaatgaaccagaccctattgtttctgggggccccgacgcacccccccaacgggggctggcgcaaccacgcccatatctgctacgccaatcttatcgcgggtagggtcgtgcccttccaggtcccacctgacgccatgaatcgtcggatcatgaacgtccacgaggcagttaactgtctggagaccctatggtacacacgggtgcgtctggtggtcgtagggtggttcctgtatctggcgttcgtcgccctccaccaacgccgatgtatgtttggcgtcgtgagtcccgcccacaagatggtggccccggccacctacctcttgaactacgcaggccgcatcgtatcgagcgtgttcctgcagtacccctacacgaaaattacccgcctgctctgcgagctgtcggtccagcggcaaaacctggttcagttgtttgagacggacccggtcaccttcttgtaccaccgccccgccatcggggtcatcgtaggctgcgagttgatgctacgctttgtggccgtgggtctcatcgtcggcaccgctttcatatcccggggggcatgtgcgatcacataccccctgtttctgaccatcaccacctggtgttttgtctccaccatcggcctgacagagctgtattgtattctgcggcggggcccggcccccaagaacgcagacaaggccgccgccccggggcgatccaaggggctgtcgggcgtctgcgggcgctgctgttccatcatcctctcgggcatcgcagtgcgattgtgttatatcgccgtggtggccggggtggtgctcgtggcgcttcactacgagcaggagatccagaggcgcctgtttgatgtatgacgtcacatccaggccggcggaaaccgtaacggcatatgcaaattggaaactgtcctgtcttggggcccacccacccgacgcgtcatatgcaaatgaaaatcggtcccccgaggccacgtgtagcctggatcccaacgaccccgcccatgggtcccaattggccgtcccgttaccaagaccaacccagccagcgtatccacccccgcccgggtccccgcggaagcggaacggggtatgtgatatgctaattaaatacatgccacgtacttatggtgtctgattggtccttgtctgtgccggaggtggggcgggggccccgcccggggggcggaacgaggaggggtttgggagagccggccccggcaccacgggtataaggacatccaccacccggccggtggtggtgtgcagccgtgttccaaccacggtcacgcttcggtgcctctccccgattcgggcccggtcgctcgctaccggtgcgccaccaccagaggccatatccgacaccccagccccgacggcagccgacagcccggtcatggcgactgacattgatatgctaattgacctcggcctggacctctccgacagcgatctggacgaggacccccccgagccggcggagagccgccgcgacgacctggaatcggacagcagcggggagtgttcctcgtcggacgaggacatggaagacccccacggagaggacggaccggagccgatactcgacgccgctcgcccggcggtccgcccgtctcgtccagaagaccccggcgtacccagcacccagacgcctcgtccgacggagcggcagggccccaacgatcctcaaccagcgccccacagtgtgtggtcgcgcctcggggcccggcgaccgtcttgctcccccgagcagcacgggggcaaggtggcccgcctccaacccccaccgaccaaagcccagcctgcccgcggcggacgccgtgggcgtcgcaggggtcggggtcgcggtggtcccggggctgccgatggtttgtcggacccccgccggcgtgcccccagaaccaatcgcaaccctgggggaccccgccccggggcggggtggacggacggccccggcgccccccatggcgaggcgtggcgcggcagtgagcagcccgacccacccggaggccagcggacacggggcgtgcgccaagcaccccccccgctaatgacgctggcgattgcccccccgcccgcggacccccgcgccccggccccggagcgaaaggcgcccgccgccgacaccatcgacgccaccacgcggttggtcctgcgctccatctccgagcgcgcggcggtcgaccgcatcagcgagagctttggccgcagcgcacaggtcatgcacgacccctttggggggcagccgtttcccgccgcgaatagcccctgggccccggtgctggcgggccaaggagggccctttgacgccgagaccagacgggtctcctgggaaaccttggtcgcccacggcccgagcctctatcgcacttttgccggcaatcctcgggccgcatcgaccgccaaggccatgcgcgactgcgtgctgcgccaagaaaatttcatcgaggcgctggcctccgccgacgagacgctggcgtggtgcaagatgtgcatccaccacaacctgccgctgcgcccccaggaccccattatcgggacgaccgcggctgtgctggataacctcgccacgcgcctgcggccctttctccagtgctacctgaaggcgcgaggcctgtgcggcctggacgaactgtgttcgcggcggcgtctggcggacattaaggacattgcatccttcgtgtttgtcattctggccaggctcgccaaccgcgtcgagcgtggcgtcgcggagatcgactacgcgacccttggtgtcggggtcggagagaagatgcatttctacctccccggggcctgcatggcgggcctgatcgaaatcctagacacgcaccgccaggagtgttcgagtcgtgtctgcgagttgacggccagtcacatcgtcgcccccccgtacgtgcacggcaaatatttttattgcaactccctgttttaggtacaataaaaacaaaacatttcaaacaaatcgcccctcgtgttgtccttctttgctcatggccggcggggcgtgggtcacggcagatggcgggggtgggcccggcgtacggcctgggtgggcggagggaactaacccaacgtataaatccgtccccgttccaaggccggtgtcatagtgcccttaggagcttcccgcccgggcgcatccccccttttgcactatgacagcgacccccctcaccaacctgttcttacgggccccggacataacccacgtggcccccccttactgcctcaacgccacctggcaggccgaaacggccatgcacaccagcaaaacggactccgcttgcgtggccgtgcggagttacctggtccgcgcctcctgtgagaccagcggcacaatccactgctttttctttgcggtatacaaggacacccaccacacccctccgctgattaccgagctccgcaactttgcggacctggttaaccacccgccggtcctacgcgaactggaggataagcgcggggtgcggctgcggtgtgcgcggccgtttagcgtcgggacgattaaggacgtctctgggtccggcgcgtcctcggcgggagagtacacgataaacgggatcgtgtaccactgccactgtcggtatccgttctcaaaaacatgctggatgggggcctccgcggccctacagcacctgcgctccatcagctccagcggcatggccgcccgcgcggcagagcatcgacgcgtcaagattaaaattaaggcgtgatctccaacccccccatgaatgtgtgtaaccccccccaaaaaaataaagagccgtaacccaaccaaaccaggcgtggtgtgagtttgtggacccaaagccctcagagacaacgcgacaggccagtatggaccgtgatacttttatttattaactcacaggggcgcttaccgccacaggaataccagaataatgaccaccacaatcgcgaccaccccaaatacagcatggcgccacaccacgccacaacagccctgtcgccggtatggggcatgatcagacgagccgcgcgccgcgcgttgggccctgtacagctcgcgcgaattgaccctaggaggccgccacgcgcccgagttttgcgttcgtcgctggtcgtcgggcgccaaagccccggacggctgttcggtcgaacgaacggccacgacagtggcataggttggggggtggtccgacatagcctcggcgtacgtcgggaggcccgacaagaggtcccttgtgatgtcgggtggggccacaagcctggtttccggaagaaacaggggggttgccaataacccgccagggccaaaactccggcgctgcgcacgtcgttcggcgcggcgccgggcgcgccgagcggctcgctgggcggcttggcgtgagcggccccgctccgacgcctcgccctctccggaggaggttggcggaattggcacggacaacaggggcccagcagagtacggtggaggtgggtccgtgggggtgtccagatcaataacgacaaacggcccctcgttcctaccagacaagctatcgtaggggggcgggggatcagcaaacgcgttccccgcgctccataaacccgcgtcgggttgcgccgcctccgaagccatggatgcgccccaaagccacgactcccgcgcgctaggtccttggggtaatggaaaaggccctactccccatccaagccagccaagttaacgggctacgccttcgggaatgggactggcaccccggcggattttgttgggctggcatgcgtcgcccaaccgagggccgcgtccacgggacgcgccttttataaccccgggggtcattcccaacgatcacatgcaatctaactggctcccctctccccccctctcccctctccccccctctcccctctccccccctctcccctctccccccctctcccctctccccccctctcccctctccccccctctcccctctccccccctctcccctctccccccctctcccctctccccccctctcccctctccccccctctcccctctcccctctgctctttccccgtgacacccgacgctgggggcgtggctgccgggaggggccgcggatgggcgggcctacttggtttcccgccccccccccccccccccgaaccgccccgccggctttgcccccctttgatcccctgctacccccaacccgtgctggtggtgcgggttggggggggatgtgggcgggggtgcgcgggaggtgtcggtggtggtggtggtggtggtagtaggaatggtggtgagggggggggggcgctggttggtcaaaaaagggagggacgggggccggcagaccgacggcgacaacgctccccggcggccgggtcgcggctcttacgagcggcccggcccgcgctcccaccccccgggccgtgtccttgctttccccccgtctcccccccccccgccttctcctcctcctcctcgtttttccaaaccccgcccacccggcccggcccggcccggcccggcccggccaccgccgcccacccacccacctcgggatacccagccccggtcccccgttccccgggggccgttatctccagcgccccgtccggcgcgccgccccccgccgctaaaccccatcccgcccccgggaccccacatataagcccccagccacacgcaagaacagacacgcagaacggctgtgtttatttaaataaaccaatgtcggaataaacaaacacaaacacccgcgacggggggacggaggggacggagggagggggtgacgggggacgggaacagacacaaaaacaaccacaaaaaacaaccacccaccgacacccccaccccagtctcctcgccttctcccacccaccccacgcccccactgagcccggtcgatcgacgagcacccccgcccacgcccccgcccctgccccggcgacccccggcccgcacgatcccgacaacaataacaaccccaacggaaagcggcggggtgttgggggaggcgaggaacaaccgaggggaacgggggatggaaggacgggaagtggaagtcctgatacccatcctacacccccctgccttccaccctccggccccccgcgagtccacccgccggccggctaccgagaccgaacacggcggccgccgcagccgccgcagccgccgccgacaccgcagagccggcgcgcgcactcacaagcggcagaggcagaaaggcccagagtcattgtttatgtggccgcgggccagcagacggcccgcgacaccccccccccgcccgtgtgggtatccggccccccgccccgcgccggtccattaagggcgcgcgtgcccgcgagatatcaatccgttaagtgctctgcagacaggggcaccgcgcccggaaatccattaggccgcagacgaggaaaataaaattacatcacctacccacgtggtgctgtggcctgtttttgctgcgtcatctcagcctttataaaagcgggggcgcggccgtgccgatcgcgggtggtgcgaaagactttccgggcgcgtccgggtgccgcggctctccgggcccccctgcagccggggcggccaaggggcgtcggcgacatcctccccctaagcgccggccggccgctggtctgttttttcgttttccccgtttcgggggtggtgggggttgcggtttctgtttctttaacccgtctggggtgtttttcgttccgtcgccggaatgtttcgttcgtctgtcccctcacggggcgaaggccgcgtacggcccgggacgaggggcccccgaccgcggcggtccgggccccgtccggacccgctcgccggcacgcgacgcgaaaaaggccccccggaggcttttccgggttcccggcccggggcctgagatgaacactcggggttaccgccaacggccggcccccgtggcggcccggcccggggccccggcggacccaaggggccccggcccggggccccacaacggcccggcgcatgcgctgtggtttttttttcctcggtgttctgccgggctccatcgcctttcctgttctcgcttctccccccccccttcttcacccccagtaccctcctccctcccttcctcccccgttatcccactcgtcgagggcgccccggtgtcgttcaacaaagacgccgcgtttccaggtaggttagacacctgcttctccccaatagaggggggggacccaaacgacagggggcgccccagaggctaaggtcggccacgccactcgcgggtgggctcgtgttacagcacaccagcccgttcttttccccccctcccacccttagtcagactctgttacttacccgtccgaccaccaactgcccccttatctaagggccggctggaagaccgccagggggtcggccggtgtcgctgtaaccccccacgccaatgacccacgtactccaagaaggcatgtgtcccaccccgcctgtgtttttgtgcctggctctctatgcttgggtcttactgcctggggggggggagtgcgggggagggggggtgtggaaggaaatgcacggcgcgtgtgtaccccccctaaagttgttcctaaagcgaggatacggaggagtggcgggtgccgggggaccggggtgatctctggcacgcgggggtgggaagggtcgggggagggggggatggagtaccggcccacctggccgcgcgggtgcgcgtgcctttgcacaccaaccccacgtcccccggcggtctctaagaagcaccgccccccctccttcataccaccgagcatgcctgggtgtgggttggtaaccaacacgcccatcccctcgtctcctgtgattctctggctgcaccgcattcttgttttctaactatgttcctgtttctgtctcccccccccccacccctccgccccaccccccaacacccacgtctgtggtgtggccgacccccttttgggcgccccgtcccgccccgccacccctcccatcctttgttgccctatagtgtagttaaccccccccgccctttgtggcggccagaggccaggtcagtccgggcgggcaggcgctcgcggaaacttaacacccacacccaacccactgtggttctggctccatgccagtggcaggatgctttcggggatcggtggtcaggcagcccgggccgcggctctgtggttaacaccagagcctgcccaacatggcacccccactcccacgcacccccactcccacgcacccccactcccacgcacccccactcccacgcacccccactcccacgcacccccactcccacgcacccccactcccacgcacccccactcccacgcacccccactcccacgcatccccgcgatacatccaacacagacagggaaaagatacaaaagtaaacctttatttcccaacagacagcaaaaatcccctgagtttttttttattagggccaacacaaaagacccgctggtgtgtggtgcccgtgtctttcacttttcccctccccgacacggattggctggtgtagtgggcgcggccagagaccacccagcgcccgacccccccctccccacaaacacggggggcgtcccttattgttttccctcgtcccgggtcgacgccccctgctccccggaccacgggtgccgagaccgcaggctgcggaagtccagggcgcccactagggtgccctggtcgaacagcatgttccccacgggggtcatccagaggctgttccactccgacgcgggggccgtcgggtactcggggggcatcacgtggttacccgcggtctcggggagcagggtgcggcggctccagccggggaccgcggcccgcagccgggtcgccatgtttcccgtctggtccaccaggaccacgtacgccccgatgttccccgtctccatgtccaggatgggcaggcagtcccccgtgatagtcttgttcacgtaaggcgacagggcgaccacgctagagacccccgagatgggcaggtagcgcgtgaggccgcccgcggggacggccccggaagtctccgcgtggcgcgtcttccgggcacacttcctcggcccccgcggcccagaagcagcgcgggggccgagggaggtttcctcttgtctccctcccagggcaccgacggccccgcccgaggaggcggaagcggaggaggacgcggccccggcggcggaagaggcggcccccgcgggggtcggggccgaggaggaagaggcagaggaggaagaggcggaggccgccgaggacgtcaggggggtcccgggcccaccctggccgcgcccccccggccctgagtcggagggggggtgcgtcgccgccctcttggcccctgccggcgcgagggggggacgcgtggactggggggaggggttttcctggcccgacccgcgcctcttcctcggacgcaccgccgcctcctgctcgacagaggcggcggaggggagcggggcggcgccggagggggcggcgccgcgggagggcccgtgcccaccctccacgcccggcccccccgagccgcgcgccaccgtcgcacgcgcccggcacagactctgttcttggttcgcggcctgagccagggacgagtgcgactggggcacacggcgcgcgtccgcggggcgggcggccggctccgccccgggggccggggcgcgggggccgggccccggaggcggcgctcgcacgcacggggccacggccgcgcgggggcgcgcgggtcccgacgcggccgcggacgcggggggcccggggcggggggcggagcctggcatgggcgccgcggggggcctgtggggagaggccgggggggagtcgctgatcactatggggtctctgttgtttgcaaggggggcgggtctgttgacaagggggcccgtccggcccctcggccgccccgcctccgcttcaacaaccccaaccccaaccccaacccccccggaggggccagacgccccccgcggcgccgcggctcgcgactggcgggagccgccgccgccgctgctgttggtggtggtgttggtgttactgctgccgtgtggcccgatgggcgccgaggggggcgctgtccgagccgcggccggctggggggctgcgtgagacgccccgcccgtcacggggggcgcggcggcgcctctgcgtgggggggcgcggggcgtccggcggggggcgggcggtacgtagtctgctgcaagagacaacggggggcgcgatcaggttacgccccctccccggcccgccctttcctcgcccgcccgcctattcctccctccccccccctcctcctcctcctcccccagggtccttgccgccccccgcctcaccgtcgtccaggtcgtcgtcatcctcgtccgtggtgggctccgggtgggtgggcgacagggccctcaccgtgtgcccccccagggtcaggtaccgcggggcgaaccgctgattgcccgtccagataaagtccacggccgtgcccgccctgacggcctcctcggcctccatgcgggtctgggggtcgttcacgatcgggatggtgctgaacgacccgctgggcgtcacgcccactatcaggtacaccagcttggcgttgcacagcgggcaggtgttgcgcaattgcatccaggttttcatgcacgggatgcagaagcggtgcatgcacgggaaggtgtcgcagcgcaggtggggcgcgatctcatccgtgcacacggcgcacacgtcgccctcgtcgctccccccgtcctctcgagggggggcgcccccgcaactgccggggtcttcctcgcggggggggctcccccccgagaccgcccccccatccacgccctgcggccccagcagccccgtctcgaacagttccgtgtccgtgctgtccgcctcggaggcggagtcgtcgtcatggtggtcggcgtccccccgcccccccacttcggtctccgcctcagagtcgctgctgtccggcaggtctcggtcgcagggaaacacccagacatccggggcgggctaaggggaaaaaaggggggcgggtaagaatggggggggatttcccgcgtcaatcagcacccacgagttccccctctcccccccccgcctcacaaagtcctgcccccctgctggcctcggaagaggggggagaaaggggtctgcaaccaaaggtggtctgggtccgtcctttggatcccgacccctcttcttccctcttctcccgccctccagacgcaccggagtcgggggtcccacggcgtcccccaaatatggcgggcggctcctccccacccccctagatgcgtgtgagtaaggggggcctgcgtatgagtcagtggggaccacgcccccaacacggcgaccccggtccttgtgtgtttgttgtgggggcgtgtctctgtgtatgagtcagggggtcccacggcgaccccgggccctgcgtctgagtcaaaggggccatgtgtatgtgttgggggtctgtatatataaagtcagggggtcacatggcgacccccaacagggcgaccccggtccctgtatatatagggtcagggggttccgcaccccctaacatggcgcccccggtccctgtatatatagtgtcacggggttccacgccccctaacatggcgccccaacatggcgcccggctcccgtgtatgagtgggggtcccccaacatggcggccggttccagtgtaagggtcgggggtcccccaacatggcgccccccaatatggcgccccccaatatggcgccccagacatggcgcccggcccctcacctcgcgctgggggcggccctcaggccggcgggtactcgctccggggcggggctccatgggggtcgtatgcggctggagggtcgcggacggagggtccctgggggtcgcaacgtaggcggggcttctgtggtgatgcggagagggggcggcccgagtctgcctggctgctgcgtctcgctccgagtgccgaggtgcaaatgcgaccagactgtcgggccagggctaacttataccccacgcctttcccctccccaaaggggcggcagtgacgattcccccaatggccgcgcgtcccaggggaggcaggcccaccgcggggcggccccgtccccggggaccaacccggcgcccccaaagaatatcattagcatgcacggcccggcccccgatttgggggcccaacccggtgtcccccaaagaaccccattagcatgcccctcccgccgacgcaacaggggcttggcctgcgtcggtgccccggggcttcccgccttcccgaagaaactcattaccatacccggaaccccaggggaccaatgcgggttcattgagcgacccgcgggccaatgcgcgaggggccgtgtgttccgccaaaaaagcaattagcataacccggaaccccaggggagtggttacgcgcggcgcgggaggcggggaataccggggttgcccattaagggccgcgggaattgccggaagcgggaagggcggccggggccgcccattaatgagtttctaattaccataccgggaagcggaacaaggcctcttgcaagtttttaattaccataccgggaagtgggcggcccggcccattgggcggtaactcccgcccaatgggccgggccccgaagactcggcggacgctggttggccgggccccgccgcgctggcggccgccgattggccagtcccgcccccgaggcggcccgccctgtgagggcgggctggctccaagcgtatatatgcgcggctcctgccatcgtctctccggagagcggcttggtgcggagctcccgggagctccgcggaagacccaggccgcctcgggtgtaacgttagaccgagttcgccgggccggctccgcgggccagggcccgggcacgggcctcgggccccaggcacggcccgatgaccgcctcggcctccgccacccggcgccggaaccgagcccggtcggcccgctcgcgggcccacgagccgcggcgcgccaggcgggcggccgaggcccagaccaccaggtggcgcacccggacgtggggcgagaagcgcacccgcgcgggggtcgcgggggtcgcgggggtcgcgggggtcgcgggggtcgcggggggctccggcgccccctccccgcccgcgcgtcgcaggcgcaggcgcgccaggtgctccgcggtgacgcgcaggcggagggcgaggcgcggcggaaggcggaaggggcgcgagggggggtgggaggggtcagccccgccccccgggcccacgccgggcggtgggggccggggccggggggcggcggcggtgggccgggcctctgcgcccgcgcaccaccaccgcccctcgccccctcccgcccctcgccccctcccgcccctcgccccctcccgcccctcgccccctcccgcccctcgccccctcccgcccctcgccccctcccgcccctcgccccctcccgcccctcgccccctcccgcccctcgccccctcccgcccctcgccccctcccgcccctcgccccctcccgcccctcgccccctcccgcccctcgccccctcccgcccctcgccccctcccgcccctcgccccctcccgcccctcgccccctcccgcccctcgccccctcccgcccctcgccccctcccgcccctcgccccctcccgcccctcgaataaacaacgctactgcaaaacttaatcaggttgttgccgtttattgcgtcttcgggtctcacaagcgccccgccccgtcccggcccgttacagcaccccgtccccctcgaacgcgccgccgtcgtcttcgtcccaggcgccttcccagtccacaacttcccgccgcgggggcgtggccaagcccgcctccgcccccagcacctccacggcccccgccgccgccagcacggtgccgctgcggcccgtggccgaggcccagcgaatcccgggcggcgccggcggcagggcccccgggccgtcgtcgtcgccgcgcagcaccagcgggggggcgtcgtcgtcgggctccagcagggcgcgggcgcaaaagtccctccgcggcccgcgccaccgggccgggccggcgcgcaccgcctcgcgccccagcgccacgtacacgggccgcagcggcgcgcccaggccccagcgcgcgcaggcggcgtgcgagtgggcctcctcctcgcagaagtccggcgcgccgggcgccatggcgtcggtggtccccgaggccgccgcccggccgtccagcgccggcagcacggcccggcggtactcgcgcggggacatgggcaccggcgtgtccgggccgaagcgcgtgcgcacgcggtagcgcacgttgccgccgcggcacaggcgcagcggcggcgcgtcggggtacaggcgcgcgtgcgcggcctccacgcgcgcgaagacccccgggccgaacacgcggcccgaggccagcaccgtgcggcgcaggtcccgcgccgccggccagcgcacggcgcactgcacggcgggcagcagctcgcacgccaggtaggcgtgctgccgcgacaccgcgggcccgtcggcgggccagtcgcaggcgcgcacggtgttgaccacgatgagccgccggtcgccggcgctggcgagcagccccagaaactccacggccccggcgaaggccaggtcccgcgtggacagcagcagcacgccctgtgcgcccagcgccgacacgtcgggggcgccggtccaattgcccgcccaggcggccgtgtccggcccgcacagccggttggccagggccgccagcaggcaggacagcccgccgcgctcggcggaccactccggcggcccccccgaggccccgccgccggccaggtcctcgcccggcagcggcgagtacagcaccaccacgcgcacgtcctcggggtcggggatctggcgcatccaggccgccatgcggcgcagcgggcccgaggcgcgcagggggccaaagaggcggcccccggcggccccgtgggggtgggggttatcgtcgtcgtcgccgccgccgcacgcggcctgggcggcgggggcgggcccggcgcaccgcgcggcgatcgaggccagggcccgcgggtcaaacatgagggccggtcgccaggggacggggaacagcgggtggtccgtgagctcggccacggcgcgcggggagcagtaggcctccagggcggcggccgcgggcgccgccgtgtggctgggccccgggggctgccgccgccagccgcccagggggtcggggccctcggcgggccggcgcgacacggccacggggcgcgggcgggcctgcgccgcggcggcccggggcgccgcgggctgggcgggggcgggctcgggccccgggggcgtggaggggggcgcgggcgcggggaggggggcgcgggcgtccgagccgggggcgtccgcgccgctcttcttcgtcttcgggggtcgcgggccgccgcctccgggcggccgggccgggccgggactcttgcgcttgcgcccctcccgcggcgcggcggaggcggcggcggccgccagcgcgtcggcggcgtccggtgcgctggccgccgccgccagcagggggcgcaggctctggttgtcaaacagcaggtccgcggcggcggcggccgcggagctcggcaggcgcgggtcccgcggcagcgcggggcccagggccccggcgaccaggctcacggcgcgcacggcggccacggcggcctcgctgccgccggccacgcgcaggtccccgcgcaggcgcatgagcaccagcgcgtcgcgcacgaaccgcagctcgcgcagccacgcgcgcaggcggggcgcgtcggcgtgcggcggcggcggggaagcggggcccgcgggtccctccggccgcggggggctggcgggccgggccccggccagccccgggacggccgccaggtcgccgtcgaagccctcggccagcgcctccaggatcccgcggcaggcggccaggcactcgacggccacgcggccggcctgggcgcggcgcccggcgtcgtcgtcggcgtcggcgtggcgggcggcgtcggggtcgtcgccccccgcgggggaggcgggcgcggcggacagccgccccagggcggcgaggatccccgcggcgccgtacccggcgggcaccgcgcgctcgcccggtgcggcggcggcgacggcggcgaccccctcgtcatctgcgccggcgccggggctccccgcggcccccgtcagcgccgcgttctcgcgcgccaacaggggcgcgtaggcgcggcgcaggctggtcagcaggaagcccttctgcgcgcggtcgtatcggcggctcatggccacggcggccgccgcgtgcgccaggccccagccgaagcggccggccgccatggcgtagcccaggtggggcacggcccgcgccacgctgccggtgatgaaggagctgctgttgcgcgcggcgcccgagatccggaagcaggcctggtccagcgccacgtccccggggaccacgcgcgggttctggagccaccccatggcctccgcgtccggggtgtacagcagccgcgtgatcagggcgtactgctgcgcggcgtcgcccagctcgggcgcccacacggccgccggggcgcccgaggcctcgaaccggcgtcgcgcctcctccgcctcgggcgccccccagaggcccgggcggctgtcgcccaggccgccgtacagcacccgccccgggggcgggggcccggcgccgggccacggctccccgctgacgtacccgtcgcgatagcgcgcgtagaaggcgccggaggtcgcgtcggcgtccagctcgacccgccggggctgcccggccgtgaagcggcccgtggcgtcgcggccggccaccgccgcgcgggcccggcggcgctcgatgcggcccgcggaggccgcgggggtcctcgccgccgcccggggcttgggcgcggcctcggagagggggggtggcccgggcgggggcggcgtccgcccgggggctgccggcgccgcgctcgacggaccccgcccgacggcccgcgcctcgcgtgcgtggtcggccgcgtcgttgccgtcgtcgtcctcgtcctcgtcggacgacgaggacgaagaggatgcggacgacgaggacgaggacccggagtccgacgaggtcgatgacgccgatggccgccaccggccgtgacgacgtctccgcggcggctgggccggcgggcgcggcgacaggcggtccgtggggtccggatacgcgccgcgtagcggggcctcccgttcgcggccccgggccggggcccggtcgccggcggcgtcggctgcgtcgtcgtactcgtccccgtcatcgtcgtcggctcgaaaggcgggggtccggggcggcgaggccgcggggtcgggcgtcgggatcgtccggacggcctcctctaccatggaggccagcagagccagctgtcgcggcgagacggcgtccccggcgtcctcgccggcgtcggtgcccgccgcgggggccctcccgtcccgccgggcgtcgtcgaggtcgtgggggtggtcggggtcgtggtcggggtcgtccccgccctcctccgtctccgcgccccacccgagggccccccgctcgtcgcggtctgggctcggggtgggcggcggcccgtcggtggggcccggggagccggggcgctgcttgttctccgacgccatcgccgatgcggggcgatcctccggggatacggctgcgacggcggacgtagcacggtaggtcacctacggactctcgatggggggagggggcgagacccacggaccccgacgacccccgccgtcgacgcggaactagcgcggaccggtcgatgcttgggtgggaaaaaggacagggacggccgatccccctcccgcgcttcgtccgcgtatcggcgtcccggcgcggcgagcgtctgacggtctgtctctggcggtcccgcgtcgggtcgtggatccgtgtcggcagccgcgctccgtgtggacgatcggggcgtcctcgggctcatatagtcccaggggccggcgggaaggaggagcagcggaggccgccggccccccgcccccccggcgggcccaccccgaacggaattccattatgcacgaccccgccccgacgccggcacgccgggggcccgtggccgcggcccgttggtcgaacccccggccccgcccatccgcgccatctgccatgggcggggcgcgagggcgggtgggtccgcgccccgccccgcatggcatctcattaccgcccgatccggcggtttccgcttccgttccgcatgctaacgaggaacgggcagggggcggggcccgggccccgacttcccggttcggcggtaatgagatacgagccccgcgcgcccgttggccgtccccgggccccccggtcccgcccgccggacgccgggaccaacgggacggcgggcggcccaagggccgcccgccttgccgcccccccattggccggcgggcgggaccgccccaagggggcggggccgccgggtaaaagaagtgagaacgcgaagcgttcgcacttcgtcccaatatatatatattattagggcgaagtgcgagcactggcgccgtgcccgactccgcgccggccccgggggcgggcccgggcggcggggggcgggtctctccggcgcacataaaggcccggcgcgaccgacgcccgcagacggcgccggccacgaacgacgggagcggctgcggagcacgcggaccgggagcgggagtcgcagagggccgtcggagcggacggcgtcggcatcgcgacgccccggctcgggatcgggatcgcatcggaaagggacacgcggacgcgggggggaaagacccgcccaccccacccacgaaacacaggggacgcaccccgggggcctccgacgacagaaacccaccggtccgccttttttgcacgggtaagcaccttgggtgggcggaggagggggggacgcgggggcggaggaggggggacgcgggggcggaggaggggggacgcgggggcggaggaggggggacgcgggggcggaggaggggggacgcgggggcggaggagggggctcacccgcgttcgtgccttcccgcaggaggaacgtcctcgtcgaggcgaccggcggcgaccgttgcgtggaccgcttcctgctcgtcgggcggggggaagccactgtggtcctccgggacgttttctggatggccgacatttccccaggcgcttttgcgccttgtgtaaaagcgcggcgtcccgctctccgatccccgcccctgggcacgcgcaagcgcaagcgcccttcccgccccctctcatcggagtctgaggtagaatccgatacagccttggagtctgaggtcgaatccgagacagcatcggattcgaccgagtctggggaccaggatgaagccccccgcatcggtggccgtagggccccccggaggcttggggggcggttttttctggacatgtcggcggaatccaccacggggacggaaacggatgcgtcggtgtcggacgaccccgacgacacgtccgactggtcttatgacgacattcccccacgacccaagcgggcccgggtaaacctgcggctcacgagctctcccgatcggcgggatggggttatttttcctaagatggggcgggtccggtctacccgggaaacgcagccccgggcccccaccccgtcggccccaagcccaaatgcaatgctacggcgctcggtgcgccaggcccagaggcggagcagcgcacgatggacccccgacctgggctacatgcgccagtgtatcaatcagctgtttcgggtcctgcgggtcgcccgggacccccacggcagtgccaaccgcctgcgccacctgatacgcgactgttacctgatgggatactgccgagcccgtctggccccgcgcacgtggtgccgtttgctgcaggtgtccggcggaacctggggcatgcacctgcgcaacaccatacgggaggtggaggctcgattcgacgccaccgcggaacccgtgtgcaagcttccttgtttggagaccagacggtacggcccggagtgtgatcttagtaatctcgagattcatctcagcgcgacaagcgatgatgaaatctccgatgccaccgatctggaggccgccggttcggaccacacgctcgcgtcccagtccgacacggaggatgccccctcccccgttacgctggaaaccccagaaccccgcgggtccctcgctgtgcgtctggaggatgagtttggggagtttgactggaccccccaggagggctcccagccctggctgtctgcggtcgtggccgataccagctccgtggaacgcccgggcccatccgattctggggcgggtcgcgccgcagaagaccgcaagtgtctggacggctgccggaaaatgcgcttctccaccgcctgcccctatccgtgcagcgacacgtttctccggccgtgagtccggtcgccccgacccccttgtatgtccccaaaataaaagaccaaaatcaaagcgtttgtcccagcgtcttaatggcgggaagggcggagagaaacagaccacgcggacatggggggtgtttgggggtttattggcaccgggggctaaagggtggtaaccggatagcagatgtgaggaagtcggggccgttcgccgcgaacggcgatcagagggtcagtttcttgcggaccacggcccggcgatgtgggttgctcgtctgggacctcgggcatgcccatacacgcacaacacggacgccgcaccggatgggacgtcgtaagggggcctggggtagctgggtggggtttgtgcagagcaatcagggaccgcagccagcgcatacaatcgcgctcccgtccgtttgtcccgggcagtaccacgccgtactggtattcgtaccggctgagcagggtctccagggggtggttgggggccgcggggaacggggtccacgccacggtccactcgggcaaaaaccgagtcggcacggcccacggttctcccacccacgcgtctggggtcttgatggcgataaatcttaccccgagccggattttttgggcgtattcgagaaacggcacacacagatccgccgcgcctaccacccacaagtggtagaggcgaggggggctgggttggtctcggtgcagcagtcggaagcacgccacggcgtccacgacctcggtgctctccaaggggctgtcctccgcaaacaggcccgtggtggtgtttggggggcagcgacaggacctagtgcgcacgatcgggcgggtgggtttgggtaagtccatcagcggctcggccaaccgtcgaaggttggccggacgaacgacgaccggggtacccaggggttctgatgccaaaatgcggcactgcctaagcaggaagctccacagggccgggcttgcgtcgacggaagtccggggcagggcgttgttctggtcaaggagggtcattacgttgacgacaacaacgcccatgttggtatattacaggcccgtgtccgatttggggcacttgcagatttgtaaggccacgcacggcggggagacaggccgacgcgggggctgctctaaaaatttaagggccctacggtccacagacccgccttcccgggggggcccttggagcgaccggcagcggaggcgtccgggggaggggagggtgatttacgggggggtattattgaagcatttatcagggttattgtctcatgagcggatacatatttgaatgtatttagaaaaataaacaaataggggttccgcgcacatttccccgaaaagtgccacctgacgtctaagaaaccattattatcatgacattaacctataaaaataggcgtatcacgaggccctttcgtcttcaagaattcgcgccggatccttaattaagtctagagtccacgtgacgtgcggagtgcgccgtgctctgttggtttcacctgtggcagcccgggccccccgcgggcgcgcgcgcgcgcaaaaaaggcgggcggcggtccgggcggcgtgcgcgcgcgcggcgggcgtggggggcggggccgcgggagcggggggaggagcggggggaggagcggggggaggagcggggggaggagcggggggaggagcggggggaggagcggggggaggagcggggggaggagcggggggaggagcggggggaggagcggggggaggagcggggggaggagcggggggaggagcggggggaggagcggggggaggagcggggggaggagcggggggaggagcggggggaggagcggccagacgccgaaaacgggccccccccaaaacacaccccccgggggtcgcgcgcggccctttaaagcggtggcggcgggcagcccgggccccccgcggccgagactagcgagttagagactgtttattaacgcttacaatttacgccttaagatacattgatgagtttggacaaaccacaactagaatgcagtgaaaaaaatgctttatttgtgaaatttgtgatgctattgctttatttgtaaccattataagctgcaataaacaagttaacaacaacaattgcattcattttatgtttcaggttcagggggaggtgtgggaggttttttaaagcaagtaaaacctctacaaatgtggtatggctgattatgatctagagtcgcggccgccactgtgctggatatctgcagaattcggcttggtggccctcctatagtgagtcgtattatactatgccgtatactatgccgatgattaattgtcaacactaggcgccttaacatgcacttatcctatcattgatgaattgaactaacttattgatgatgcatggcccgaggatgagcaacagaaggaggagtaataggggcccagcgatggttgatagcagggtagtgaaccaaggggagttattgaaccatccttcataccagttttggcttttctggcgctctaactgtcttttatccagtttttctttgagttttttcatggagtcccgtactgcacctgagtggtctatgtaaaaacagcactcttcctttagggccgcacagaggccaccttcttttagaaacagcaagtcaaggcctctcctattttggagcactacctcggacagggaagtcagtgagtcctctaacttgctgactgagtcttggagggcccggaggtcagcatctatggcgatctggaggcttgtcaggccttgctggaggtctataggtcctttaattaaggcagttgaaccagtacctattcccgccgtgattcccaaccccagtaaaacagctagggtaagtgagacagcctctcttttagtcctggggtgagaattgtcataggcctgtaacaaaacttcttcaggatagtaatagatgcgaggaatcagctggacctggatacagaaatctctagtctgattaaaaactgaggtggagaggcaaggggtgaggccagtgctgcaagcccaccagctatggttggaggggagcagatactgatggtctccggaggaattgatggatagggtctgattgcagagatgctgatgggtaaagggcacctttcctatgcacaacccgtgtcctgagacctcagtgagggtgagctttccttgggtcccccagcggcaccggtcaaggtcggtggagtaggcgacctctcctgatgaggctattgcttcataataaggggggcccatggccaaacaaagccagcaagactcagtggcccctgggttggtagcatttaaggttaggaaggccccctgcacaagatcaaaaagtctgtcgcctgtggtgggaggcggagtgtttagggtaacaattgtttttctcaccgtgggagtttgtgcactagtcgccagggctgtggagttagagtcggggagagatggcggtggcgcttcccttgggggaagaggaggtgggagagcgagggacgttctaggaggtccttgttccacaaggacgaggtcaggacctactgccacagctggcatgttggtgatttttaagcgaatggtgaactgtacgcctggatgtccagacacatagaatcttaatccccaggtttttcccgttatccagtccttggataattttcctttgtctgtgaaatctattttaagggggttacaccagccggtctggtgacactgttgaaatttttgagtccattcgctattttggtcccattttacagttatgaggtcttttgaggatttagatagccaataaccggtccccgtggtctcacaatcccattctttacagtatagggattctagccccccgcaccttctagcttctgaaagggtccggccatcccggggacatacgtagaaggtagagcttgccattctagtcctagcccgagggtagctgcaccctatggctccccaggtgatttgcttataagcggcagtatagtctgagtccggaggtctgactcgtttagaggacgagacatcggttcccgggatatcccaggactcaagactagccgccaaggcacatacatcaggtttaagtgtgggccaccaagtccaagggggctggactgcctttgtatcccagacaacgtctccagtttgggacagtacctgccaagtgagggtcatgggctggtgggggttcttattttgcagactcgtcccgccgccgccgaatacgcagcttaagaggatgatcagtcttttccagctcccaggactcatctggtgccgaaggtggtgcaggtttgaggtgagaagcatggacccaggcagcaataccatcgacttttaccgcggtcggggtagtcagcaacaccaggtatgggcctttccaccgaggctcaaggctgctgggtcgatggcgtctgacaagcacttgatccccgacctggaacgggtgagggattgttacggtaccaggcttaaagccgaattccaccacactggactagtggatccgagctcggtaccaagcttaagtttaaacgctagcagatctacactcacgcaaggcggaaccacccaccccacagccaaacgcggctaccgcctccggtgggttgtgttggccgactggcccggcgcgtccgtatacacacgtttaaagggccatttgggccgccccgcagaaagtccgcaacccacttaattaagtcgataggtcagggggtgggtcgtcaaactgccgctccttaaaaccccggggcccgtcgttcggggtgctcgttggttggcactcacggtgcggcgaatggcctgtcgtaagttttgtcgcgtttacgggggacagggcaggaggaaggaggaggccgtcccgccggagacaaagccgtcccgggtgtttcctcatggccccttttataccccagccgaggacgcgtgcctggactccccgcccccggagacccccaaaccttcccacaccacaccacccagcgaggccgagcgcctgtgtcatctgcaggagatccttgcccagatgtacggaaaccaggactaccccatagaggacgaccccagcgcggatgccgcggacgatgtcgacgaggacgccccggacgacgtggcctatccggaggaatacgcagaggagctttttctgcccggggacgcgaccggtccccttatcggggccaacgaccacatccctcccccgtgtggcgcatctccccccggtatacgacgacgcagccgggatgagattggggccacgggatttaccgcggaagagctggacgccatggacagggaggcggctcgagccatcagccgcggcggcaagcccccctcgaccatggccaagctggtgactggcatgggctttacgatccacggagcgctcaccccaggatcggaggggtgtgtctttgacagcagccatccagattacccccaacgggtaatcgtgaaggcggggtggtacacgagcacgagccacgaggcgcgactgctgaggcgactggaccacccggcgatcctgcccctcctggacctgcatgtcgtctccggggtcacgtgtctggtcctccccaagtaccaggccgacctgtatacctatctgagtaggcgcctgaacccactgggacgcccgcagatcgcagcggtctcccggcagctcctaagcgccgttgactacattcaccgccagggcattatccaccgcgacattaagaccgaaaatatttttattaacacccccgaggacatttgcctgggggactttggcgccgcgtgcttcgtgcagggttcccgatcaagccccttcccctacggaatcgccggaaccatcgacaccaacgcccccgaggtcctggccggggatccgtataccacgaccgtcgacatttggagcgccggtctggtgatcttcgagactgccgtccacaacgcgtccttgttctcggccccccgcggccccaaaaggggcccgtgcgacagtcagatcacccgcatcatccgacaggcccaggtccacgttgacgagttttccccgcatccagaatcgcgcctcacctcgcgctaccgctcccgcgcggccgggaacaatcgcccgccgtacacccgaccggcctggacccgctactacaagatggacatagacgtcgaatatctggtttgcaaagccctcaccttcgacggcgcgcttcgccccagcgccgcagagctgctttgtttgccgctgtttcaacagaaatgaccgccccctgggggcggtgctgtttgcgggttggcacaaaaagaccccgatccgcgtctgtggtgtttttggcatcatgtcgcagggcgccatgcgtgccgttgttcccattatcccattccttttggttcttgtcggtgtatcgggggttcccaccaacgtctcctccaccacccaaccccaactccagaccaccggtcgtccctcgcatgaagcccccaacatgacccagaccggcaccaccgactctcccaccgccatcagccttaccacgcccgaccacacaccccccatgccaagtattggactggaggaggaggaagaggaggagggggccggggacggcgaacatcttgaggggggagatgggacccgtgacaccctaccccagtccccgggcccagccttcccgttggctgaggacgtcgagaaggacaaacccaaccgtcccgtagtcccatcccccgatcccaacaactcccccgcgcgccccgagaccagtcgcccgaagacaccccccaccattatcgggccgctggcaactcgccccacgacccgactcacctcaaagggacgacccttggttccgacgcctcaacataccccgctgttctcgttcctcactgcctcccccgccctggacaccctcttcgtcgtcagcaccgtcatccacaccttatcgtttttgtgtattggtgcgatggcgacacacctgtgtggcggttggtccagacgcgggcgacgcacacaccctagcgtgcgttacgtgtgcctgccgtccgaacgcgggtagggtatggggcgggggatggggagagcccacatgcggaaagcaagaacaataaaggcggtggtatctagttgatatgcatctctgggtgtttttggggtgtggcggacgcggggcggtcattggacggggtgcagttaaatacatgcccgggacccatgaagcatgcgcgacttccgggcctcagaacccacccgaaacggccaacggacgtctgagccaggcctggctatccggagaaacagcacacgacttggcgttctgtgtgtcgcgatgtctctgcgcgcagtctggcatctggggcttttgggaagcctcgtgggggctgttcttgccgccacccatcggggacctgcggccaacacaacggaccccttaacgcacgccccagtgtcccctcaccccagccccctggggggctttgccgtccccctcgtagtcggtgggctgtgcgccgtagtcctgggggcggcatgtctgcttgagctcctgcgtcgtacgtgccgcgggtgggggcgttaccatccctacatggacccagttgtcgtataatttcccccccccccccccttctccgcgtgggtgatgtcgggtccaaactcccgacaccaccagctggcatggtataaatcaccggtgcgccccccaaaccatgtccggcagggggatgggggggcaatgcggagggcacccaacaacaccgggctaaccaggaaatccgtggccccggcccccaataaagatcgcggtagcccggccgtgtgacactatcgtccataccgaccacaccgacgaatcccccaagggggaggggccattttacgaggaggaggggtataacaaagtctgtctttaaaaagcaggggttagggagttgttcggtcataagcttcagcgcgaacgaccaactaccccgatcatcagttatccttaaggtctcttttgtgtggtgcgttccggtatggggggggctgccgccaggttgggggccgtgattttgtttgtcgtcatagtgggcctccatggggtccgcagcaaatatgccttggtggatgcctctctcaagatggccgaccccaatcgctttcgcggcaaagaccttccggtcctggaccagctgaccgaccctccgggggtccggcgcgtgtaccacatccaggcgggcctaccggacccgttccagccccccagcctcccgatcacggtttactacgccgtgttggagcgcgcctgccgcagcgtgctcctaaacgcaccgtcggaggccccccagattgtccgcggggcctccgaagacgtccggaaacaaccctacaacctgaccatcgcttggtttcggatgggaggcaactgtgctatccccatcacggtcatggagtacaccgaatgctcctacaacaagtctctgggggcctgtcccatccgaacgcagccccgctggaactactatgacagcttcagcgccgtcagcgaggataacctggggttcctgatgcacgcccccgcgtttgagaccgccggcacgtacctgcggctcgtgaagataaacgactggacggagattacacagtttatcctggagcaccgagccaagggctcctgtaagtacgccctcccgctgcgcatccccccgtcagcctgcctctccccccaggcctaccagcagggggtgacggtggacagcatcgggatgctgccccgcttcatccccgagaaccagcgcaccgtcgccgtatacagcttgaagatcgccgggtggcacgggcccaaggccccatacacgagcaccctgctgcccccggagctgtccgagacccccaacgccacgcagccagaactcgccccggaagaccccgaggattcggccctcttggaggaccccgtggggacggtggcgccgcaaatcccaccaaactggcacataccgtcgatccaggacgccgcgacgccttaccatcccccggccaccccgaacaacatgggcctgatcgccggcgcggtgggcggcagtctcctggcagccctggtcatttgcggaattgtgtactggatgcgccgccacactcaaaaagccccaaagcgcatacgcctcccccacatccgggaagacgaccagccgtcctcgcaccagcccttgttttactagatacccccccttaatgggtgcgggggggtcaggtctgcggggttgggatgggaccttaactccatataaagcgagtctggaaggggggaaaggtggacagtcgataagtcggtagcgggggacgcgcacctgttccgcctgtcgcacccacagctttttttgcgaaccgtcccgttccgggatgccgtgccgcccgttgcagggcctggtgctcgtgggcctctgggtctgtgccaccagcctggttgtccgtggccccacggtcagtctggtatcaaactcatttgtggacgccggggccttggggcccgacggcgtagtggaggaagacctgcttattctcggggagcttcgctttgtgggggaccaggtcccccacaccacctactacgatgggggcgtagagctgtggcactaccccatgggacacaaatgcccacgggtcgtgcatgtcgtcacggtgaccgcgtgcccacgtcgccccgccgtggcattcgccctgtgtcgcgcgaccgacagcactcacagccccgcatatcccaccctggagctcaatctggcccaacagccgcttttgcgggtccagagggcaacgcgggactatgccggggtgtacgtgttacgcgtatgggtcggtgacgcgccaaacgccagcctgtttgtcctggggatggccatagccgccgaagggactctggcgtacaacggctcggcctatggctcctgcgacccgaaactgcttccgtcttcggccccgcgtctggccccggcgagcgtataccaacccgcccctaaccaggcctccaccccctcgaccaccacctccaccccctcgaccaccatccccgctccctcgaccaccatccccgctccccaagcatcgaccacgcccttccccacgggagatccaaaaccacaacctcccggggtcaaccacgaacccccatctaatgccacgcgagcgacccgcgactcgcgatacgcgctaacggtgacccagataatccagatagccatccccgcgtccatcatagccctggtgtttctggggagctgtatttgctttatacacagatgtcaacgccgctaccgacgctcccgtcgcccgatttacagcccccagatgcccacgggcatctcatgcgcggtgaacgaagcggccatggcccgcctcggagccgagctcaaatcgcatccgagcaccccccccaaatcccggcgccggtcgtcacgcacgccaatgccctccctgacggccatcgccgaagagtcggagcccgctggggcggctgggcttccgacgccccccgtggaccccacgacacccaccccaacgcctcccctgttggtataggtccacggccactggccgggagcaccacataaccgaccgcagtccctgagttgggaataaaccggtattatttacctatatccgtgtatgtcgatttctttccccccctccccggaaaccaaagaaggaagcaaagaatggatgggaggagttcaggaagccggggagagggcccgcggcgcatttaaggcgttgttgtgttgactttgcctcttctggcgggttggtgcggtgctgtttgttgggctcccattttacccgaagatcggctgctatccccgggacatggatcgcggggcggtggtggggtttcttctcggtgtttgtgttgtatcgtgcttggcgggaacgcccaaaacgtcctggagacgggtgagtgtcggcgaggacgtttcgttgcttccagctccggggcctacggggcgcggcccgacccagaaactactatgggccgtggaacccctggatgggtgcggccccttacacccgtcgtgggtctcgctgatgccccccaagcaggtgcccgagacggtcgtggatgcggcgtgcatgcgcgctccggtcccgctggcgatggcgtacgcccccccggccccatctgcgaccgggggtctacgaacggacttcgtgtggcaggagcgcgcggccgtggttaaccggagtctggttattcacggggtccgagagacggacagcggcctgtataccctgtccgtgggcgacataaaggacccggctcgccaagtggcctcggtggtcctggtggtgcaaccggccccagttccgaccccacccccgaccccagccgattacgacgaggatgacaatgacgagggcgaggacgaaagtctcgccggcactcccgccagcgggaccccccggctcccgcctccccccgcccccccgaggtcttggcccagcgcccccgaagtctcacatgtgcgtggggtgaccgtgcgtatggagactccggaagctatcctgttttcccccggggagacgttcagcacgaacgtctccatccatgccatcgcccacgacgaccagacctactccatggacgtcgtctggttgaggttcgacgtgccgacctcgtgtgccgagatgcgaatatacgaatcgtgtctgtatcacccgcagctcccagaatgtctgtccccggccgacgcgccgtgcgccgcgagtacgtggacgtctcgcctggccgtccgcagctacgcggggtgttccagaacaaaccccccaccgcgctgttcggccgaggctcacatggagcccgtcccggggctggcgtggcaggcggcctccgtcaatctggagttccgggacgcgtccccacaacactccggcctgtatctgtgtgtggtgtacgtcaacgaccatattcacgcctggggccacattaccatcagcaccgcggcgcagtaccggaacgcggtggtggaacagcccctcccacagcgcggcgcggatttggccgagcccacccacccgcacgtcggggcccctccccacgcgcccccaacccacggcgccctgcggttaggggcggtgatgggggccgccctgctgctgtctgcactggggttgtcggtgtgggcgtgtatgacctgttggcgcaggcgtgcctggcgggcggttaaaagcagggcctcgggtaaggggcccacgtacattcgcgtggccgacagcgagctgtacgcggactggagctcggacagcgagggagaacgcgaccaggtcccgtggctggcccccccggagagacccgactctccctccaccaatggatccggctttgagatcttatcaccaacggctccgtctgtatacccccgtagcgatgggcatcaatctcgccgccagctcacaacctttggatccggaaggcccgatcgccgttactcccaggcctccgattcgtccgtcttctggtaaggcgccccatcccgaggccccacgtcggtcgccgaactgggcgaccgccggcgaggtggacgtcggagacgagctaatcgcgatttccgacgaacgcggacccccccgacatgaccgcccgcccctcgccacgtcgaccgcgccctcgccacacccgcgacccccgggctacacggccgttgtctccccgatggccctccaggctgtcgacgccccctccctgtttgtcgcctggctggccgctcggtggctccggggggcttccggcctgggggccgtcctgtgtgggattgcgtggtatgtgacgtcaattgcccgaggcgcataaagggccggtggtccgcctagccgcagcaaattaaaaatcgtgagtcacagcgaccgcaacttcccacccggagctttcttccggcctcgatgacgtcccggctctccgatcccaactcctcagcgcgatccgacatgtccgtgccgctttatcccacggcctcgccagtttcggtcgaagcctactactcggaaagcgaagacgaggcggccaacgacttcctcgtacgcatgggccgccaacagtcggtattaaggcgtcgacgcagacgcacccgctgcgtcggcatggtgatcgcctgtctcctcgtggccgttctgtcgggcggatttggggcgctcctgatgtggctgctccgctaaaagaccgcatcgacacgcgcgtccttcttgtcgtctctcttcccccccatcaccccgcaatttgcacccagcctttaactacattaaattgggttcgattggcaatgttgtctcccggttgatttttgggtgggtggggagtgggtgggtggggagtgggtgggtggggagtgggtgggtggggagtgggtgggtggggagtgggtgggtggggagtgggtgggtggggagtgggtgggtggggagtgggtgggtggggagtgggtgggtggggagtggcaaggaagaaacaagcccgaccaccagacagaaaatgtaaccatacccaaaccgactctgggggctgtttgtggggtcggaaccataggatgaacaaaccaccccgtaccacccgcacccaagggtgcggtggctcatcggcatctgtccggtatgggttgttccccacccactcgcgttcggacgtcttagaatcatggcggttttctatgccgacatcggttttctcccccgcaataagacacgatgcgataaaatctgtttgtaaaatttattaagggtacaaattgccctagcacaggggtggggttagggccgggtccccacacccaaacgcaccaaacagatgcaggcagtgggtcgagtacagccccgcgtacgaacacgtcgatgcgtgtgtcagacagcaccagaaagcacaggccatcaacaggtcgtgcatgtgtcggtgggtttggacgcggggggccatggtggtgataaagttaatggccgccgtccgccagggccacaggggcgacgtctcttggttggcccggagccactgggtgtggaccagccgcgcgtggcggcccaacatggcccctgtagccgggggcgggggatcgcgcacgtttgcagcgcacatgcgagacacctcgaccacggttcgaaagaaggcccggtggtccgcgggcaacatcaccaggtgcgcaagcgcccgggcgtccagagggtagagccctgagtcatccgaggttggctcatcgcccgggtcttgccgcaagtgcgtgtgggttgggcttccggtgggcgggacgcgaaccgcggtgtggatcccgacgcgggcccgagcgtatgctccatgttgtggggagaaggggtctgggctcgccaggggggcatacttgcccgggctatacagacccgcgagccgtacgtggttcgcggggggtgcgtggggtccggggctcccggggagaccggggctcccggggagaccggggctccctgggagaccggggttgtcgtggatccctggggtcacgcggtaccctggggtctctgggagctcgcggtactctgggttccctaggttctcggggtggtcgcggaacccggggctcccggggaacacgcggtgtcctggggattgttggcggtcggacggcttcagatggcttcgagatcgtagtgtccgcaccgactcgtagtagacccgaatctccacattgccccgccgcttgatcattatcaccccgttgcgggggtccggagatcatgcgcgggtgtcctcgaggtgcgtgaacacctctggggtgcatgccggcggacggcacgccttttaagtaaacatctgggtcgcccggcccaactggggccgggggttgggtctggctcatctcgagagccacgggggggaaccaccctccgcccagagactcgggtgatggtcgtacccgggactcaacgggttaccggattacggggactgtcggtcacggtcccgccggttcttcgatgtgccacacccaaggatgcgttgggggcgatttcgggcagcagcccgggagagcgcagcaggggacgctccgggtcgtgcacggcggttctggccgcctcccggtcctcacgcccccttttattgatctcatcgcgtacgtcggcgtacgtcctgggcccaacccgcatggtgtccaggaaggtgtccgccatttccagggcccacgacatgctcccccccgacgagcaggaagcggtccacgcaacggtcgccgccggtcgcctcgacgaggacgttcctcctgcgggaaggcacgaacgcgggtgagccccctcctccgcccccgcgtcccccctcctccgcccccgcgtcccccctcctccgcccccgcgtcccccctcctccgcccccgcgtcccccctcctccgcccccgcgtcccccctcctccgcccccgcgtcccccctcctccacccccgcgtccccccctcctccgcccacccaaggtgcttacccgtgcaaaaaaggcggaccggtgggtttctgtcgtcggaggcccccggggtgcgtcccctgtgtttcgtgggtggggtgggcgggtctttcccccccgcgtccgcgtgtccctttccgatgcgatcccgatcccgagccggggcgtcgcgatgccgacgccgtccgctccgacggccctctgcgactcccgctcccggtccgcgtgctccgcagccgctcccgtcgttcgtggccggcgccgtctgcgggcgtcggtcgcgccgggcctttatgtgcgccggagagacccgccccccgccgcccgggcccgcccccggggccggcgcggagtcgggcacggcgccagtgctcgcacttcgccctaataatatatatatattgggacgaagtgcgaacgcttcgcgttctcacttcttttacccggcggccccgcccccttggggcggtcccgcccgccggccaatgggggggcggcaaggcgggcggcccttgggccgcccgccgtcccgttggtcccggcgtccggcgggcgggaccggggggcccggggacggccaacgggcgcgcggggctcgtatctcattaccgccgaaccgggaagtcggggcccgggccccgccccctgcccgttcctcgttagcatgcggaacggaagcggaaaccgccggatcgggcggtaatgagatgccatgcggggcggggcgcggacccacccgccctcgcgccccgcccatggcagatggcgcggatgggcggggccgggggttcgaccaacgggccgcggccacgggcccccggcgtgccggcgtcggggcggggtcgtgcataatggaattccgttcggggtgggcccgccgggggggcggggggccggcggcctccgctgctcctccttcccgccggcccctgggactatatgagcccgaggacgccccgatcgtccacacggagcgcggctgccgacacggatccacgacccgacgcgggaccgccagagacagaccgtcagacgctcgccgcgccgggacgccgatacgcggacgaagcgcgggagggggatcggccgtccctgtcctttttcccacccaagcatcgaccggtccgcgctagttccgcgtcgacggcgggggtcgtcggggtccgtgggtctcgccccctccccccatcgagagtccgtaggtgacctaccgtgctacgtccgccgtcgcagccgtatccccggaggatcgccccgcatcggcgatggcgtcggagaacaagcagcgccccggctccccgggccccaccgacgggccgccgcccaccccgagcccagaccgcgacgagcggggggccctcgggtggggcgcggagacggaggagggcggggacgaccccgaccacgaccccgaccacccccacgacctcgacgacgcccggcgggacgggagggcccccgcggcgggcaccgacgccggcgaggacgccggggacgccgtctcgccgcgacagctggctctgctggcctccatggtagaggaggccgtccggacgatcccgacgcccgaccccgcggcctcgccgccccggacccccgcctttcgagccgacgacgatgacggggacgagtacgacgacgcagccgacgccgccggcgaccgggccccggcccggggccgcgaacgggaggccccgctacgcggcgcgtatccggaccccacggaccgcctgtcgccgcgcccgccggcccagccgccgcggagacgtcgtcacggccggtggcggccatcggcgtcatcgacctcgtcggactccgggtcctcgtcctcgtcgtccgcatcctcttcgtcctcgtcgtccgacgaggacgaggacgacgacggcaacgacgcggccgaccacgcacgcgaggcgcgggccgtcgggcggggtccgtcgagcgcggcgccggcagcccccgggcggacgccgcccccgcccgggccaccccccctctccgaggccgcgcccaagccccgggcggcggcgaggacccccgcggcctccgcgggccgcatcgagcgccgccgggcccgcgcggcggtggccggccgcgacgccacgggccgcttcacggccgggcagccccggcgggtcgagctggacgccgacgcgacctccggcgccttctacgcgcgctatcgcgacgggtacgtcagcggggagccgtggcccggcgccgggcccccgcccccggggcgggtgctgtacggcggcctgggcgacagccgcccgggcctctggggggcgcccgaggcggaggaggcgcgacgccggttcgaggcctcgggcgccccggcggccgtgtgggcgcccgagctgggcgacgccgcgcagcagtacgccctgatcacgcggctgctgtacaccccggacgcggaggccatggggtggctccagaacccgcgcgtggtccccggggacgtggcgctggaccaggcctgcttccggatctcgggcgccgcgcgcaacagcagctccttcatcaccggcagcgtggcgcgggccgtgccccacctgggctacgccatggcggccggccgcttcggctggggcctggcgcacgcggcggccgccgtggccatgagccgccgatacgaccgcgcgcagaagggcttcctgctgaccagcctgcgccgcgcctacgcgcccctgttggcgcgcgagaacgcggcgctgacgggggccgcggggagccccggcgccggcgcagatgacgagggggtcgccgccgtcgccgccgccgcaccgggcgagcgcgcggtgcccgccgggtacggcgccgcggggatcctcgccgccctggggcggctgtccgccgcgcccgcctcccccgcggggggcgacgaccccgacgccgcccgccacgccgacgccgacgacgacgccgggcgccgcgcccaggccggccgcgtggccgtcgagtgcctggccgcctgccgcgggatcctggaggcgctggccgagggcttcgacggcgacctggcggccgtcccggggctggccggggcccggcccgccagccccccgcggccggagggacccgcgggccccgcttccccgccgccgccgcacgccgacgcgccccgcctgcgcgcgtggctgcgcgagctgcggttcgtgcgcgacgcgctggtgctcatgcgcctgcgcggggacctgcgcgtggccggcggcagcgaggccgccgtggccgccgtgcgcgccgtgagcctggtcgccggggccctgggccccgcgctgccgcgggacccgcgcctgccgagctccgcggccgccgccgccgcggacctgctgtttgacaaccagagcctgcgccccctgctggcggcggcggccagcgcaccggacgccgccgacgcgctggcggccgccgccgcctccgccgcgccgcgggaggggcgcaagcgcaagagtcccggcccggcccggccgcccggaggcggcggcccgcgacccccgaagacgaagaagagcggcgcggacgcccccggctcggacgcccgcgcccccctccccgcgcccgcgcccccctccacgcccccggggcccgagcccgcccccgcccagcccgcggcgccccgggccgccgcggcgcaggcccgcccgcgccccgtggccgtgtcgcgccggcccgccgagggccccgaccccctgggcggctggcggcggcagcccccggggcccagccacacggcggcgcccgcggccgccgccctggaggcctactgctccccgcgcgccgtggccgagctcacggaccacccgctgttccccgtcccctggcgaccggccctcatgtttgacccgcgggccctggcctcgatcgccgcgcggtgcgccgggcccgcccccgccgcccaggccgcgtgcggcggcggcgacgacgacgataacccccacccccacggggccgccgggggccgcctctttggccccctgcgcgcctcgggcccgctgcgccgcatggcggcctggatgcgccagatccccgaccccgaggacgtgcgcgtggtggtgctgtactcgccgctgccgggcgaggacctggccggcggcggggcctcgggggggccgccggagtggtccgccgagcgcggcgggctgtcctgcctgctggcggccctggccaaccggctgtgcgggccggacacggccgcctgggcgggcaattggaccggcgcccccgacgtgtcggcgctgggcgcacagggcgtgctgctgctgtccacgcgggacctggccttcgccggggccgtggagtttctggggctgctcgccagcgccggcgaccggcggctcatcgtggtcaacaccgtgcgcgcctgcgactggcccgccgacgggcccgcggtgtcgcggcagcacgcctacctggcgtgcgagctgctgcccgccgtgcagtgcgccgtgcgctggccggcggcgcgggacctgcgccgcacggtgctggcctcgggccgcgtgttcggcccgggggtcttcgcgcgcgtggaggccgcgcacgcgcgcctgtaccccgacgcgccgccgctgcgcctgtgccgcggcggcaacgtgcgctaccgcgtgcgcacgcgcttcggcccggacacgccggtgcccatgtccccgcgcgagtaccgccgggccgtgctgccggcgctggacggccgggcggcggcctcggggaccaccgacgccatggcgcccggcgcgccggacttctgcgaggaggaggcccactcgcacgccgcctgcgcgcgctggggcctgggcgcgccgctgcggcccgtgtacgtggcgctggggcgcgaggcggtgcgcgccggcccggcccggtggcgcgggccgcggagggacttttgcgcccgcgccctgctggagcccgacgacgacgcccccccgctggtgctgcgcggcgacgacgacggcccgggggccctgccgccggcgccgcccgggattcgctgggcctcggccacgggccgcagcggcaccgtgctggcggcggcgggggccgtggaggtgctgggggcggaggcgggcttggccacgcccccgcggcgggaagttgtggactgggaaggcgcctgggacgaagacgacggcggcgcgttcgagggggacggggtgctgtaacgggccgggacggggcggggcgcttgtgagacccgaagacgcaataaacggcaacaacctgattaagttttgcagtagcgttgtttattcgaggggcgggagggggcgaggggcgggagggggcgaggggcgggagggggcgaggggcgggagggggcgaggggcgggagggggcgaggggcgggagggggcgaggggcgggagggggcgaggggcgggagggggcgaggggcgggagggggcgaggggcgggagggggcgaggggcgggagggggcgaggggcgggagggggcgaggggcgggagggggcgaggggcgggagggggcgaggggcgggagggggcgaggggcgggagggggcgaggggcgggagggggcgaggggcgggagggggcgaggggcgggagggggcgaggggcggtggtggtgcgcg

SEQ ID NO: 36 - DNA, 155220 bp, Artificial Sequence
  entire sequence of FusOn-H2
agtccccgtcctgccgcgcgggggcgggcgcgggaaaaaagccgcgcgggggcgcccgcgggaaggcagccccgcggcgcgcggggggaggggcggcgcccgcgggggagcggccggctccgggggagggacggggaagggggcgcgcggggctgccctgccgcccgcccgccgccgccgcccgccttcgcgcccccccccaaaaaacaccccccccgggggttgactccccgggggaaaagaggcggggcgggagtccccgtcctgccgccgccccttaagagggcccgcaacacggcccgggctgcgcacgccagccgggacgggtgagttcgctaggcaagcacggactggcggttacacgtgcatgcgtgccgagtgaactctcccgccccgacgcgctccggctccgggcctacgccgagcccagccgcccgccatgtcccgccgccggggtccccgccgccggggtccccggcgccggccgcgccccggcgctccagccgtgccgcgccccggcgctccagccgtgccgcgccccggcgcgctcccaaccgcagactcccaaatggtccctgcgtacgactcgggaaccgcggtcgagagcgcgccggccgcgtcctcgctcctgcggcgctggctgctggtgccccaggcggacgacagcgacgacgcggactacgccggcaacgacgacgcagagtgggcgaacagccccccgagcgagggcggggggaaggcgccggaggccccgcacgccgcgcctgccgccgcctgccccccgccgccgccgcgcaaggagcgcgggccgcagcgcccccttccgccccacctggcgctacggctgcgcaccacgacggagtacctggcgcgcctgagcctgcgccggcggcggccccccgcgtccccgcccgcggacgcgccgcgcgggaaggtacgcctcccctccgaccccctgacgcccctccgaccccctgacgcccctccgaccccctgacgcccctccgaccccctgacgcccctccgaccccctgacgcccctccgaccccctgacgcccctccgacccccgtgtctccccgcccgcaggtgtgcttctcgccgcgcgtgcaggtgcgccatctggtggcctgggagacggccgcgcgcctggcccgacgggggtcctgggcgcgcgagcgggccgaccgcgaccggttccggcgccgcgtggcggcggccgaggcggtcatcggaccgtgcctggagcccgaggcccgagctcgggcccgagcccgagcccgggcccacgaagacggcggacccgcggaggaggaggaggcggcggcggcggcgcgcgggtcctccgccgccgcgggcccgggccgtcgggcggtctagggttgaaccggcgagggcggcctcggccggcggagccccggagctccgaaggtctgcgcgaggccgctctccgaagagacgatgggagccccgcgtatatatccgcgagggcccggcgccgccccgccgctccgcccgccccagggggcggcgccggccaaccgcgcgccgccgcgcgggcccggactccgccccggcgaccgccccgcgccggcttcccggtatggtaattagaaacttttaataggcggtcccggccgccatccccgcgcatggtaattagcaacttttaatgggccggcgttcccgctcgcggtaattagcagcttttaacgggccgccattcccgcttatggtaattaaaaacgttcggacggcccctcgctccccgcgtaattactccctcggggttccgggttatgctgattactttcttggcagaacacgcagagcctcgcgcgccgccgggtgggtgggctgatcggcccctattggtcccctgggcttcctagtatgctaatgaatttttccccgggggcgggcaccactcagggccgcgccggcggggcgccggggggactcccatctgcgtcggcggggggcggcgcatgctaatggggttcttggagtacacccggttggtccccggggacggggccgccccgagagggggggattccctccctccgcccccgccggggcgcgcggctattgggggaatcgtaaatgccgcccctttgggggagtggataggcgccgggtataaggcagccccgtgtgacggtcgggccgcattcgcaccccggcactgcgagcgacggagcggcggcccggcgggaggaggagacccggagagacagagactaaaacccggcaagagagagaccgcgggccgccgtctcgagtctaccctaccccggctcatggaaccccggcccggcacgagctcccgggcggaccccggccccgagcggccgccgcggcagacccccggcacggtgagagggcgacccccgggtctcaggcccccccttttccccggaccacccggctgcgggttgggggtggtcgcgggcggtgggctcgggggcggggacgcttgacggggccgacccccggcccgcttaagcggtcgggggacccccgtgggccgtgcgccgccccccgaccctctgggggggcgagggaggcagggaggagcccgagagcgggggacagggggggagacgaggggtcggaatccaaaggacgcagaccacctttggttacggacccctttctcccccccttccgaacaaaaagcagcgggcggggggccggggtgagggagggacacgggggacacggcgcgggggtcccgcctcacgccccgcgccctctaaatcccccccgttgctttgtcaagcagcccgccgccccgcacgcctgggggatgctcaacgacatgcagtggctcgccagcagcgactcggaggaggagaccgaggtgggaatctctgacgacgaccttcaccgcgactccacctccgaggcgggcagcacggacacggagatgttcgaggcgggcctgatggacgcggccacgcccccggcccggcccccggccgagcgccagggcagccccacgcccgccgacgcgcagggatcctgtgggggtgggcccgtgggtgaggaggaagcggaagcgggaggggggggcgacgtgtgtgccgtgtgcacggacgagatcgccccgcccctgcgctgccagagttttccctgcctgcaccccttctgcatcccgtgcatgaagacctggattccgttgcgcaacacgtgtcccctgtgcaacaccccggtggcgtacctgatagtgggcgtgaccgccagcgggtcgttcagcaccatcccgatagtgaacgacccccggacccgcgtggaggccgaggcggccgtgcgggccggcacggccgtggactttatctggacgggcaacccgcggacggccccgcgctccctgtcgctggggggacacacggtccgcgccctgtcgcccacccccccgtggcccggcacggacgacgaggacgatgacctggccgacggtgagggcgggcgggggtcgggcggggggcgggcgggggtcgggcgggggtcgggcgggggtcgggcgggggtcgggcgggggtcgggcgggggtcgggcgggggtcgggcgggggtcgggcgggggtcgggcgggggtcgggcactaaccgggggctcccgtctctgtctccctctgcagtggactacgtcccgcccgccccccgaagagcgccccggcgcgggggcggcggtgcgggggcgacccgcggaacctcccagcccgccgcgacccgaccggcgccccctggcgccccgcggagcagcagcagcggcggcgccccgttgcgggcgggggtgggatctgggtctgggggcggccctgccgtcgcggccgtcgtgccgagagtggcctctcttccccctgcggccggcggggggcgcgcgcaggcgcggcgggtgggcgaagacgccgcggcggcggagggcaggacgccccccgcgagacagccccgcgcggcccaggagccccccatagtcatcagcgactctcccccgccgtctccgcgccgccccgcgggccccgggccgctctcctttgtctcctcctcctccgcacaggtgtcctcgggccccggggggggaggtctgccacagtcgtcggggcgcgccgcgcgcccccgcgcggccgtcgccccgcgcgtccggagtccgccccgcgccgccgccgcccccgtggtgtctgcgagcgcggacgcggccgggcccgcgccgcccgccgtgccggtggacgcgcaccgcgcgccccggtcgcgcatgacccaggctcagaccgacacccaagcacagagtctgggccgggcaggcgcgaccgacgcgcgcgggtcgggagggccgggcgcggagggaggacccggggtcccccgcggcaccaacacccccggtgccgccccccacgccgcggagggggcggcggcccgcccccggaagaggcgcgggtcggactcgggccccgcggcctcgtcctccgcctcttcctccgccgccccgcgctcgcccctcgccccccagggggtgggggccaagagggcggcgccgcgccgggccccggactcggactcgggcgaccgcggccacgggccgctcgccccggcgtccgcgggcgccgcgcccccgtcggcgtctccgtcgtcccaggccgcggtcgccgccgcctcctcctcctccgcctcctcctcctccgcctcctcctcctccgcctcctcctcctccgcctcctcctcctccgcctcctcctcctccgcctcctcctcctccgcctcttcctctgcgggcggggctggtgggagcgtcgcgtccgcgtccggcgctggggagagacgagaaacctccctcggcccccgcgctgctgcgccgcgggggccgaggaagtgtgccaggaagacgcgccacgcggagggcggccccgagcccggggcccgcgacccggcgcccggcctcacgcgctacctgcccatcgcgggggtctcgagcgtcgtggccctggcgccttacgtgaacaagacggtcacgggggactgcctgcccgtcctggacatggagacgggccacataggggcctacgtggtcctcgtggaccagacggggaacgtggcggacctgctgcgggccgcggcccccgcgtggagccgccgcaccctgctccccgagcacgcgcgcaactgcgtgaggccccccgactacccgacgccccccgcgtcggagtggaacagcctctggatgaccccggtgggcaacatgctctttgaccagggcaccctggtgggcgcgctggacttccacggcctccggtcgcgccacccgtggtctcgggagcagggcgcgcccgcgccggccggcgacgcccccgcgggccacggggagtagggggagctaacactcggcttgctgcccgaaggaagccgccccccaccggaccaccggccgaggcgcctcgggggcagggggaggtggggggggggaaagacggggaggagacaggaagtgggggtgggagtgggggggggggacggacacggccccgaacagcaacacacaccagcattttgttatggactttctggccttgttgaaaacttgaggaaaaaaaaaactttatatttataaaaattttacaataaagttttgtgatgcttttgacacactttgttgttggcctttgatgcagctcccccgcgcaggggggccggggatgggggggaagggaggaggaggagggggggcgggcacgagaagccgcccccacccccgaggcctgttggtctttatcatagaacagagccggggcccggcctcgttctggctccctgtcttggtgggtgggcgggctggctggcgggtaaaaaaagagtgtgtccgtgttgacagggaggggggcccgatcgtgcagagcacgcacgtctggccggccagaccctgggggtggtgggcaggagtgggagggcgcctggctcggggagggaggagggggggggtcagccgcaccaccggcgcgaagccaggggccagggaactttgatagagaggggggaaagtggggcgggggcgagggcggttgaatcacaacgcatgcacgccctctgcccccggggacgggtgggaggaaggaggagggagaagagaagacccgaggcatgcacccgcacttacgcccgtgcccacccccgccccggcgcccaccccgcccgcacacctgcccgccacgcccgcccctcctcaccctggctgggagaaaggaggaggagcaggaagaggagacccgaggcatgcaaccgcactcaccccaccccgcccgcacacctgcccgccacgcccgcccctccttaccctggctgcggggagactcccatcggggcgagggggctcgcgcgttcgcaacaccacaccacaccacacggcccaccacaacacggcccaccacgacacaacacgacacgacgcgttttgcggggcatgcaagtcgacacaccgcgcgcgtgcctacctttccctagcggccccggcccccggcccgtttccttccgccaccactaccaccacccccccgcccgcgcccacgcggtagaggaaggggacgggcgccacacccacggctgtggccgggcacgcgcctttggggttgttgggggggggtgaccggcgcgtgggggcggtgggcgtacgggcccgacccgcgcctgcccccccgggaacgacgacgggggggggggaaacgggggtgggtggaagggaagaggaaggagaaagggggggtggatccgaacacgccggatccgcgaaaataataacaaaacaaacaaaaacagaaacaaaaacaaaaacacctagaaaaaaaggatacgggttggctcgcgggcggtgcggctgacctgcctgccctttctgggacccccgcctcgtgtttcttgaaagggggaggaagaacagttctcccccaacccctgctctcttctctcttccgcccgccccccccccctctccccgccgcctcagcagaagctcacctgtacgaccctaaacctacctgcgagaacgcgcggcgttcgaggggcgcgctctctcacacgagacacacgcaggcgccccccccccccggagcctgggtcccccggcggacggctcacgcggcgcggcgtctcggtgggacgcgggcaaagggcggcggcggcgggggggggggggggaaatgtgaggagagcgagacagagagagagaaggaagagggaaggggcgcggcgggacgggggaagacgaggagaagggaaggggcgagggtcgggcccgggagcggggcggcccgggagggagaagaaacggaacgcggaaacgccgccggcgcggcccggggccccggggcccccgcgctccgccgggggcccgggccggaccgccgggcgggggacgccttccgcccggcgccgggcggctacccgggacccccggccgggaatcgaaaaaagcctccgggggcccctttcgcgcctttcgcgaacgcgcggcgccggagggggcggccgccgaggtgcgggggcccctccggccggggcgcacctcggcggccaagccccggcccgcccgggggtccccgaggcaagaggcggaccctcggaggcgcggaagaagacgggaggcgggggaaaaaagggggaagagagggggaggtagggaggggagaggagaagggcgcgccggtgcgcggagcagccttccttctccggagtccctctcgatcggcggcgggcccctgcgttcgttgctgccgcgcccccggttttataaagacagggatgacgcagcagaaatgcccacagcaacacgcgggcggggctcgggctctccggcggcttaatggatctccgggcacggcgcccgcaaccgcagagcactcagctggcgcgcccccccccaacgtgggagtgtttaatggaagggcgtggggccggccgccggatgcccgcgggggcctaatgcggcgggaggcgtgggccgctggcgccgcggcccgtctgctggcccgcggcccgtctgctggcccgcggccacgtaaacaatgacacaggggttctctccgccgcggccggcgcggggcgttgccggcccggcccggccccggagcccgcggcgctgctcggctgcggccgcgggctccgggggctccgcactctgcccggctcgccccgtcccccctcttgctgcttttccgcgcgcctctctttcccgttgctttccctctccccccccccccctctctctctctctctctctctctccgccatcctcccgcccggccgcccactccccgctcggcctctccggctgcggtgcttgggtctccttcgtcgggcggcggggggggggcgtcgggactcgcggagggccggagaatggaaggcgaggggatgcaggaggaggatcgggactccccatcttctgcccttccatcctccgtttttccgctttccaccgccgccgccaccacccccccttccttcgcccgcccgcctcgccccggacccctcccccccgtgttccccccatcgttcaccaccacgccccccaccgcgccttggctgtttggggggtggcggcggtggtcggcgtgctgccggaggctgcgggcgcggggtaggtgggtgggcgggtggtgggggggggcccggctgcgtctcgccgcgatcccgccggtggggcgcggcggcggtcggggtggggggagagtgtcgtgggtgtgttttcgtgtcccccaccaccactcccaccccgaccgccgccgcgcccgcgtttctgccgcccgcgcgctcctgtgtggaccccggggtgggcggcgggggggggtgccgtgggtgtggcggcggggcgcgggccggggccggggctcgctggtccgccgaagtaaagaaaagatcgccaccgtgtgttcgtctgtgtgttctgcgcggcgccggggcccccctgccgggcggggcggtggggcggggtcggggtcgcggcggggaaggaaggaaagaccccggaagcgccgggagggggcgccggcgcgacgcgggcggccgggcgggggcgcgcggcggccgggcgggggcgcgcggcggccgggcgggggcgcgcggcggccgggcgggggcgcgcggcggccgggcgggggcgcgcggcggccgggcgggggcgcgcggcggccgggcgggggcgcgctttccccgcgtcgcccctcgggttcccaagacctatcacgtgtgcgcaggggaggggaggacgcgggggaggggaggacgcgggggaggggaggacgcgggggatatataaagcggtagaaagcgcgggaatgggcatattggacccgcgtgattcggttgctcgcggttgtcttgtttggacgttttttatgcgggaacaagggggcttaccggttacactgtccgctcgctatggggttcgtctgtctgtttgggcttgtcgttatgggagcctggggggcgtggggtgggtcacaggcaaccgaatatgttcttcgtagtgttattgccaaagaggtgggggacatactaagagtgccttgcatgcggacccccgcggacgatgtttcttggcgctacgaggccccgtccgttattgactatgcccgcatagacggaatatttcttcgctatcactgcccggggttggacacgtttttgtgggataggcacgcccagagggcgtatctggttaacccctttctctttgcggcgggatttttggaggacttgagtcactctgtgtttccggccgacacccaggaaacaacgacgcgccgggccctttataaagagatacgcgatgcgttgggcagtcgaaaacaggccgtcagccacgcacccgtcagggccgggtgtgtaaactttgactactcacgcactcgccgctgcgtcgggcgacgcgatttacggcctgccaacaccacgtcaacgtgggaaccgcctgtgtcgtcggacgatgaagcgagctcgcagtcgaagcccctcgccacccagccgcccgtcctcgccctttcgaacgcccccccacggcgggtctccccgacgcgaggtcggcgccggcatactcgcctccgacgcaactagccacgtctgcatcgcaagccaccctgggtcgggagcaggacagccgacccgtctagcggccgggtcggctgtccagcgtcgtcgccctagaggctgtccgccgggcgtgatgttttccgcatctacgacccccgaacagcccctggggctgtcgggcgatgcgacgccgcccctgccgacttccgtgcccctggactgggccgcgtttcggcgcgcgtttctgatcgacgacgcctggcggcccctgttggagccggagctcgcgaaccccctaaccgcgcgcctcctcgcggagtatgaccgtcggtgccagaccgaagaggtgctgccgccgcgggaggatgtgttctcctggacgcggtattgtacccccgacgacgtgcgcgtggttatcatcgggcaggacccgtaccaccatcccggccaggcgcacggcctggcgtttagcgtgcgtgcggatgtgccggtgcctccgagtctacggaacgtgctggcggcggttaaaaattgttaccccgacgcgcgcatgagcggccgcggctgcctggaaaagtgggctcgcgacggcgtgctgttgttgaacacgaccctgaccgtcaagcgcggggcggcggcgtcccactccaagcttggatgggaccgttttgtgggcggggtggtccaacggctggccgcgcgccgcccgggcctggtctttatgctctggggcgcccatgcccagaacgcgatcaggcccgaccctcgccaacactacgtcctcaagttttctcacccgtcgcccctctccaaggtcccgtttgggacgtgccagcatttcctcgccgcgaatcgctacctcgaaacccgggacattatgccgatcgactggtcggtataagatgccgacatccggggtcttgatttacgagggggcaattaataaagactgttgatggttaaatctcgggtctcataccggtccgtgatgtcgggcgtgggggaagagagggtcccctctgcgtttactatccttgcctcgtggggctggacgtttgcaccccagaaccatgatcctggcgcgtcgccgaatacgacgcccatagagtcgattgcggggaccgcaccggacgcgcacgtggggcctctcgacggagagccggaccgggatgcgatctccccgcttacgtcgagcgtggccggcgacccgccgggggcggacggcccctacgtcacctttgatactctgtttatggtatcttcgatcgacgaactggggcgccgccagctcacggatacgatccgtaaggacctgcggctgtcgctggccaagttcagcatcgcgtgtaccaagacctcgtcgttttcggggacggccgcgcgccagcgcaagcgcggagcaccgccgcaacgcacatgcgtaccacgcagcaacaagagcctccagatgttcgttttgtgcaagcgcgccaacgccgcgcaggtgcgcgagcagctgcgggcggttattcggtcgcgcaagccgcgcaagtattacacgcggtcctcggatgggcggctctgcccggccgtccccgtgtttgtacacgagtttgtttcgtccgaacccatgcgcctccatcgagataacgtcatgctgtctacggaaccagactaagcacccccgccgtcccctttcttttccccctacccttcccccgttactgatgtgttgtacgtttcaataaataacacgtagcttattttgttggatgatggattgattgattttattgaccgttcgttcgcccggcggtgccgtcgccgcgcgcagagggaatatgcaagcgggcggggtggggaggaaagaaggtttcaggttccgggggttgggtctgcgtcgtccagggtggggctgatctgaatttcccgcagaacctcgaccagtaggtctgttgtgtttgctgggaactcgcccgccgttggggatacgggggcggggggtgtggtcgggcggacgtccaggggtgcgttatcgcacccccgcgccgcctcgggggccgtcccgtagatcgttgcggtgatgtagatggtgtccggggtccacaccaccgtcaggatgccggccgtcgcactccggacgctttcgccgtgcgatgagctgacccaggagtcaaaggggtacgcgtacatatgggcgtcccaccagcgctccagcctctgggtactagcgcgtcctataaagcggtatgcgcaaaattcggcacgacagtcgataatcaccagcagcccgatgggggtgtgttgtatcaccacgcctccgcggggcaggcggtcctggcgcgctcgaccccgcgtcagaaccgcgcgcgtccctgactcaaacacgtgcaccacctgtgccgcgtccggcagcgcgctcgttagcgacgccctggggtgatgtaggctgtacgcgatggtcgtctgggggttccccatgtctcgggggggtgggggtgaatgtcacccggcccgggtgcggtgggaacgcgagggaatggagggttaatagacaatgaccacattcggatcgcgtagagcagatagtatgtgctcgctaatgacgtcatcgcgttcgtggcgctcccggagcgggtttagattcatgtgcaggaactcggatgaggtggtgcgggacatggctacgtacgcgctgtttaggcgcaggtttccgggcgtgaagcatatggcgaccttgtccagactgagcccctgggagcgcgtgatggtcatcgcgagtttggagctgatgccgtagtcggcgttgatggccatggccagctccgtggagtcgatcgactcgacaaactcactgatgttggtattgacgacagacatgaagccgtgctggtcccgcaggacgatgtagggcaggggggactcctccaagaactcggccacgccggccgtcgcgtgccgccgccgcagctcctccgcgaacgcgaacacccgggtgtacgtgtaccccatcagcgtgtagttgtccgtctgcagggccacggacatcagccccccgcgcggcgagccggtcagcagctcgcagccccggaaaatgacattgtccacgtaggtgctgaagggggcgctctcaaacacctccccgaagagctcccgtaggataaggtatcgccccagaaaggccctcttcaggagcccaaactgggcgtggacggccgcggtggtctcaggctcttcgagggcgtagtggcagtagaacacgtccagctgctgttcgtccagcccggcgaagataacgtcaaggtcgtcgtcggggaagtcgtccgggcccccgtcccgcgggcccaggtgcttaaaattgaacgcacgctcccccggagagcggtcgctggtgtcggcggccctggttgccgatgcgccggcggcgtcccggcgtagcgacaggagttctgccgtcagctcccctaggcggccgtaggccagggtcctctgggtcgcgtccaggccggggcgctggagaaagttgtaaaagtgaatcagcccgccgaacatgagccgcgacaggaaccggtaggcgaactccaccgaggtctccccctgggtcttcacgaagctgtcgtcgcgcagcacagcctcgaaggtccgaaacgtcccgtcgaacccaaacaccatctttcggaggcgcgcggtcaccgcgacctggctgttgaggacgtacgtgatgtcgttccgggccacgactagctgttgcttgctgtgcacctcacagcgcacgtgccccgcgtcctggtcctgactctgggagtagttggtgatgcgactggcgttggccgtgatccacttttccatggtcagcgtgggttgctgcgtgagccgtcgatactcgtcaaactctttgaccgacacaaacgtgagcacggggagggtaaacacaacaaactccccctcgcgagtcacctttaggtaggcgtggagcttggccatgtacgcgctgacctccttgtgggacgagaacagccgcgtccaccccggaaggttggccgggttggtgatgtaactttccgggacgacaaagcggtccacaaactgcatgtgctcctcggtgatgggaaggccgtactccagcaccttcatgaggttcccgaactcgtgctccacacatcgcttgttgttaatgaaaatggcccagctgtgcgagaggcgcgtgtactcgcgtagggtgcggttgcagatgaggtacgtgagcacgttttcgctctgccggacggagcatcgcagtttttggtgttcgaaggtggactccagcgaggccgtctgggtcggcgaccccacgcacaccagcaccggccgcaggcggcccgcgtactggggggtgtggtacagggcgttaatcatccaccagcaatacaccacggtcgtgagtaggtgccgccccaggagcccggcctcgtcgatgacgataatgttgctgcgggtgaaagccggcagcgccccgtgtgtgaccgaggccaggcgcgtgagggcaccctggcccagccccaaagtctgctctagggcggtgagggcgtggaactcgtttcgcgcgtcttcgcccccgtgcgccgccagggcccgcttggtgatgtcgaggatcacctcccagtagtacgtcaggtctcgccgctgcaggtcttccagcgaggcggggctgctggccagggtgtacgggtgctgccccagctgggcctggacgtgattcccgcgaaacccgaactcgtgaaagatggtgttgatgggtcgactcagaaacgcccccgagagcttaacgtacatgttctgcgccgcgattcgcgtggcgcccgtgaccacgcagtccaggacctcgttgagggtctgcacgcacgtactctttccggatccggcgttgccggtgatgagatacgccgcgaacggaaactcccggagcggcaggccggtcgggacctccaaggccgccacgtcccggaaccactgcaggcgcggcacctgcgtgacgtcgagctgctgctgcgagagctctcggatgcgtgcgatgattggttggaccccgtgcatggacgtaaaatttaaaaacgcctcgtccctgaaccgcacggcgggtctggccccgggctgctgtgggggcggacctggtgcccggacgtcccgcgagccctccccgccggacgccgccatggccgcacagcgcgcgcgggcgccggcgatgcggacgcggggcggcgacgcggcgctatgcgcccccgaggacggctgggtgaaggttcaccccacccccgggacgatgttgttccgcgagattctcctcgggcagatggggtacaccgagggtcagggggtgtacaacgtcgtccggtccagcgaggccgccacccgacagctgcaggcggcgatcttccacgcgctcctcaacgccacgacgtaccgggacctggaggaggactggcgccgccacgtggtggcccgcggcctccagccgcagcggctggttcgcaggtaccggaacgcccgggagggcgatatcgccggggtggccgagcgggtgttcgacacgtggcgatgcacgctcaggacgacgctgctggactttgcccacggggtggtagactgctttgcgccgggcggcccaagcggaccgaccagcttccccaaatatatcgactggctgacgtgtctggggctggttcccatattgcgcaagacgcgcgagggggaggcgacgcagcgcctgggggcgtttctcaggcagcacacgctgccccggcagctggccacggtcgccggggccgcggagcgcgccggcccggggcttctggatctggccgtcgcgttcgactccacgcgcatggcggaatacgaccgcgtgcacatctactacaaccatcgccggggggagtggctggtgcgcgacccggtcagcgggcagcgcggcgagtgcctggtgctgtgcccccccctgtggaccggcgaccgcctggtcttcgattcgcccgttcagcggctgtgccccgagatcgtcgcgtgccacgccctccgggaacacgcgcacatctgccgtctgcgcaacaccgcgtccgtcaaggtgctgttggggcgcaagagcgacagcgagcgcggggtggctggcgccgcgcgggtcgtcaataaggcgctgggggaggatgacgagacgaaggccggctcggccgcctcgcgtctcgtgcggctcatcatcaacatgaagggcatgcgccacgtgggcgacatcaacgacacggtacgcgcctacttggacgaggcgggggggcacctgatcgacacccccgccgtcgaccacaccctccctgggttcggcaagggcggcaccggccgcgggtcgcgcccccaggacccgggggcgcgaccgcagcagcttcgccaggcgtttcagacggccgtggtcaacaacatcaacggcatgctggagggctatatcaataatctctttggaaccatagaacgcctgcgagagacgaacgcgggtctggcgacccagctgcaggcgcgcgaccgcgagctgcggcgcgcccaggcgggggcgctggagcgggagcagcgcgcggcggaccgggcggccgggggaggcgcgggccgcccggcggaggcggatcttctccgggccgactacgacattatcgacgtcagcaagtccatggacgacgacacgtacgtggccaacagtttccagcaccagtacatccccgcgtacggccaggacctcgagcgcctgtcgcgcctctgggagcacgagctggtgcgctgcttcaagattctgcgccaccgcaacaagcagggccaggaaacgtcgatctcgtactctagcggggcgatcgcctccttcgtggccccgtatttcgagtacgtgcttcgcgccccccgagcgggcgcgctcatcaccggctccgatgtcatcctaggggaggaggagttatgggaggcggtctttaagaaaacccgcctgcagacgtacctgacagacgtcgcggccctgttcgtggcggacgtacagcacgcggctctgccccggcccccctccccaacccccgccgatttccgggcgagcgcgtccccgcggggcgggtcccggtcccggacccggacccgatcccggtcgcccgggagaacgccgaggggtgcgccggaccagggctggggcgtcgaacgcagggatggccgaccccacgcccgccgatgagggaacggccgccgccatcctcaaacaggccatcgccggggaccgcagtctggtcgaggtggcggaggggatcagcaaccaggcgctgctgcgcatggcctgcgaggtgcgccaggtcagcgatcgccagccgcggtttaccgcgaccagcgtcctgcgcgttgacgtcacccccagggggcggttgcggttcgttctggacgggagttccgacgacgcgtacgtggcgtcggaggattactttaagcgctgcggggaccagccgacgtatcgcggttttgcggtcgtcgtcctcacggccaacgaggaccacgtgcacagcctggccgtgccccccctcgttctgctgcaccggctctccttgtttcgccccacggacctccgggacttcgagctcgtctgcctgctgatgtacctggagaactgtccccggagccacgccacgccctcgctgttcgtcaaggtgtcggcgtggttgggggtcgtggcccgccacgcgtctcccttcgagcgcgtccgctgccttctcctccgcagctgccactggatcctgaacacgctaatgtgcatggcgggcgtgaagcccttcgacgacgagctagtcctgccccactggtacatggcccactacctgctggccaacaatccgccccccgtcctctcggccctgttttgcgccaccccgcagagctctgcgttgcagttgcccgggcccgtcccccgcacggactgtgtggcctataacccggccggcgtcatgggaagctgctggaattccaaggacctgcgttcggctctggtgtattggtggctttcggggagccccaaacgacggacctcgtcgcttttctatcggttttgctaactccggaaaataaacgtgttttttatggaacgttccccacctgtcgtgtcatctctcgggggatggtggtgggcctgtgtgtgtgtcttgtgcaccgaaggaggaaagtgggggggtggtggtgctggtggtggaaagacatgatagagggaacaaagaaatagaagaaaaccacaaccggcgcgtgccagtaaatacggacgcgcgcacacgcggggggtaagttggagcacggggccccggtttattgaccaaattcagggaaacagaaaccgaatcttttcatcgaaagggtacacaaagctcccgccctcgccccacacgccttccagaacccccgtaaacaccagttgaatctcgcgcaggatctcgcgcaggtgatgggcgcagtccacgggggggagcaccaagggccgcgggtacagatccacggggacgccgaccgactccccgcccccgggacatacgcgcacgacgcgtctccagtattgctccgcgtccagcagggcgcctccgcggaaggccgtttggggcagggggtcgtcggcctcgcctgggggggtcagaacgctccagtactccgcgtccagacgcctcccgaaggcatccaggacaaagcggtcacaggcgtcctccatgacgccccgggccgcgcacacggcctcctccggcgggccggcggccggccgccggaggattcgtctcagcgcgtcgcgcataacctcggccgccgcggcgtacgcggccccgcggagaggaaatccctgcaggaagtcggtgtcatcgcgggagttccagaaccacgccccggtctggctccaggtgacgacgtgggtgtagacgccctctggcgccagggagggggcgaggcgcgggcgtatgccgttggccgaaagtacggcgcgcacggacgcctcgagggcccggcgggcgtcctggatcgcgccgtgcgcggcgtccgcgtccccggggtccacgttgaacagcccccagaacgcagccccggtgccgccgcagaccgcaaacttcaccgagctggccgtctgctcgatctgcaggcagacggcggccatgaccccgccgagcagctgccggagcgcggggcaggcgtcgcacgcgtccggcaccaggcgctccagcacggcccgggcccagggctccgagggggcggccgccaccagcgcgtccagcctttccaggcccgcccgcccccgggcttccggcagcccggcctccccgaggcccgcgagggcggccaggagctgggcctggagcccggagaaacaaaaccgcgccgtccagaccggcccgacggccgccggggggtcgagtagttggatggtggtggccgtggggtgccaccgcgcgaccgcttcccgaaaggcgggcaggaggcggccggccgcctccgaggccacggccggccatgcccgcgggggcaggacgaccctggcgcccaccgcgggccaggcccccaggcacgcggcatgggtggccgcggcgccccgcaccaggtcacgcgccgactcggcggcggcggcggccggcacggtaaacgtgggccagcccggaaatcccagcacggcaaagtattggacgggccctccccggacctcaaacccgggccccagaaaagcgaagacgggggccagggctccgggggcggcgtggaccgtggtatgccactgccggaagagggcgaccagcgccggggcggagaacccgtcgccggcgctcacgaagtagtcgtagccgcgcggcagcagcacccgcgccgtgacccgctgcgggtgtccgcggggccgcaggccgacctcgcacacctcgaccaggtccgcgaaggcgccctccttcctggtcggcggaaacgccagggtggtgtattcgcgcgcaaaacgcgcggtcctcgtcgtgatggtgacggcgagcgaggcggaggacgcgcactgggggctgtcgcgaatggcggccaggcgcgcccacgccaaccgcgcgccggggtgctcggcgacgcgcgcggacagggccagcgggtcgacgtcgaccttggcctccacgtccaggagggcggcgcgaggagcggccggcgggccccacgacgccctttcgaccctcacgaccagacccgtctgcgggtcccagcccaggcgcagcgggacgaagagggcccaccggcccgtctggcgctccagggccgccagaacgcacgcatacagcgcccgccacagggtcgggtcccccaggggctccagcggggaggcggccggggccgtcgcggcgcgggcggccgcgacggccccgggggccgagacgtcgggggagccgtagaagtcctgcaggtcggacgaaccaacggacacctccgcgaagcgcgcgcgcgcctcccccgcggcgtcgcgacagaccagatacagcagggcgtggaggcagtcgcgcgtgcgcgggggcagccataccgcgtatagggtaatggcgctgacgctctcctccacccaaacgatgccgggggcttccatgccacgacgcccgggggttgccgtgtatcgaacgagcgcggccccagacttatagggtgctaaagttcaccgccccctgcatcatgggccaggcctcggtgggaagctccgacagagccgcctcgagaatgatgtcagtgttgggctgggcgccggaggcgtgcgtgcgcaagcagcgcccccacgcgggcgcgcgcagcttgaagcgcgcgcccgcaaactcccgcttatgggccatcagcagcgcgtacagctgtctgtgcgtccggcaggcgctgtggtcgatgcggtgggcgtccagcagctccacgatggctcgcttggtgaggtttttaacgcgccccgccccgggaaacgtctgcgtgctcttggccagctgcaccccgaacagttcgccccagatgatcttgaacagcgacagcgcgtgctccgtctcgctcacggacccgcgcggggggcagccgctcagggcgtcggccacgcgcttaaccgcgtcctccgacagcaaggggccgtcggtcacgttacagtggcccagttcgaacaccagctgcatgtagcggtcgtagtgggggttcagcagctccagcacgtcctcggggctaaaggttcgccccgaccccccggccatcgagtcccactgcaggcacgcggccatggtgctgcacagacggaacagctcccagacgggggcgacgtttagggtggggtgtagggccacaagctccagctctccggcggcgttgatcgtggggatgacgcccgtggcgtagtggtcgtaaagccgccggaagatggcgctgctatgggcggccatggggacgcgaagacaggcctccagcagcaccaggtagatgaaccgcgtgcggccgaccaggctgttgaggccgcgcatgagcgcgaccacctcggccggcgcgacgtccggccggaggtacttttcgacgaaaaggcccacctcctccgtctcggcggcctgggccgacagggacgtgtcggggtcctggcagcgcagctcccgcagatcccgctgggccctcagggcatcaaaatgtatcccccgcaaaaacagacaaaagttcctcggggtcagcgcggcgtcgtggccccagaaccgcacgtgcatgcagttgagggtcagaagcatgtggaggatgttaagactgtccgcgaggcacgccagcgtgcacctctcgaagtagtgcttgtaccggaatttgctgtagatgcgcgacccccgcgcctgcgccgcgtcggcgtgcgacgcgtcgcagcgccctttgaaccggcggcacaacaggttcgtcacctgggaaaactgtgccggccactgcccgctggcgctcaccacgtggttgagcagcatgggcgtaaagacgggctccgagcgcgccccggacccgtccatgtagatcagcagctcccccttgcggagagtccgtacccgccccagcgactggtacacggacaccatgtccggcccgtagttcatgggtttcacgtaggcgaacatgctgtcaaagtgcggcggatcgaagctaaggcccaccgtcacgaccgttgtgtagatgaccacccggtaccggccccatgtggtcacgtcgccgggcggggtgagcgagtggagcagcagcacgcggtccgtaaactgccggcagaacctggcaacgacctccgcgaaggagaccgtcgacgagaagatgcagacgttatctccgccggccaggcgcgcctccagctccccgaagaaggtggcgtccgggggggcgtccggggggggcgccccgcccgccggcccccggcggcgcagggccgcctgcaggacctcgggccccaggcgcgggagaaacagacaacggcgcgccgaaaatccgggcatggcgtactccccgatgaccacgtgaacgttcttttcgccccggaggctgcacagaaagtccaccagctgcgcgttggcggtggcgtccatggcgatgatccgcgggcacgtgcgcagcaggcgcagcatcaacgcgtcgacgcggcccagctgctgcatcgtcggcgagtacagttggcccaacgtcgacatgacttcgtccaggacgagcacgtcgtagttgttcaacaggttcgggcccacgcgatgaagactttccacctgcacgatgagacggtggaaggggcggtcgttcatgatgtaattggtggatgagaagtaggtgacgaagtcgggcaaccctgactcagcgaaccgcgtcgccagggtctgagtaaaactccgacgacaggagacgaccagcacactcgtgtccggagagtggatcgcttcccccaaccagcggatcagcgcggtagtttttcccgagcccattggcgcgcggaccacagttacgcaccgggccgtcggggcgctcgcgtccgggaaggtgacgggtccgtgttgctgccgctcgatcgttgttttcgggtggacccggggaacccactcggccaaatcccccccgtaaagcatccgcgccagcgatacactcgacgtgtactgctcgcactcgtcatccccgatgggacgccgggcccccaggggatcccccgaggccgcgccgggcgccgacgtcgcgcccggggcgcgggcggcgtggtgggtctggtgtgtgcaggtggcgacgttcatcgtctcggccatctgcgtcgtggggctcctggtgctggcctctgtgttccgggacaggtttccctgcctttacgcccccgcgacctcttatgcgaaggcgaacgccacggtcgaggtgcgcgggggtgtagccgtccccctccggttggacacgcagagcctgctggccacgtacgcaattacgtctacgctgttgctggcggcggccgtgtacgccgcggtgggcgcggtgacctcgcgctacgagcgcgcgctggatgcggcccgtcgcctggcggcggcccgtatggcgatgccacacgccacgctaatcgccggaaacgtctgcgcgtggctgttgcagatcacagtcctgctgctggcccaccgcatcagccagctggcccaccttatctacgtcctgcactttgcgtgcctcgtgtatctcgcggcccatttttgcaccaggggggtcctgagcgggacgtacctgcgtcaggttcacggcctgattgacccggcgccgacgcaccatcgtatcgtcggtccggtgcgggcagtaatgacaaacgccttattactgggcaccctcctgtgcacggccgccgccgcggtctcgttgaacacgatcgccgccctgaacttcaacttttccgccccgagcatgctcatctgcctgacgacgctgttcgccctgcttgtcgtgtcgctgttgttggtggtcgagggggtgctgtgtcactacgtgcgcgtgttggtgggcccccacctcggggccatcgccgccaccggcatcgtcggcctggcctgcgagcactaccacaccggtggttactacgtggtggagcagcagtggccgggggcccagacgggagtccgcgtcgccctggcgctcgtcgccgcctttgccctcgccatggccgtgcttcggtgcacgcgcgcctacctgtatcaccggcgacaccacactaaatttttcgtgcgcatgcgcgacacccggcaccgcgcccattcggcgcttcgacgcgtacgcagctccatgcgcggttctaggcgtggcgggccgcccggagacccgggctacgcggaaaccccctacgcgagcgtgtcccaccacgccgagatcgaccggtatggggattccgacggggacccgatctacgacgaagtggcccccgaccacgaggccgagctctacgcccgagtgcaacgccccgggcctgtgcccgacgccgagcccatttacgacaccgtggaggggtatgcgccaaggtccgcgggggagccggtgtacagcaccgttcggcgatggtagccgtttcgttcgttttaataaaccgacgttgtgcgtttcaccatacttcggcgcgcgtgtgtgtgtgtttttttttttgtggtgtttattttccccccaccccttccttttctttcggccaccacccccctcctcccccgtactatacaacaaaaaataccacacatacgaccaaatacggacaatcatttctgtctttattcgctatcagagagtgggggcgtgagcgtggcaggagggcgggccacgtcggggtcccgccgtctggtgtgacgcgatggggggtccgatgcgcgccggtactggggccccggcgcccgggtgaccacgcgcacgtcggggggcacgtagaagttaccctcttcttcggactcgatgtccacgacgtcaaattcgtgggcggtcagcgagacgacctccccgccgtcggtggtgatgacgttgtgtcggcagcagcagggccgcgccccggagaacgcgaggcccataacttggcgagcgtatcgtcgaaggccaggcggctgtttcgccggatgtcccggtagatccccggctcgacgcggacgggggtgatgatcagggcgatcggaacggcctggtccgggaggatcgatgccttggcgggtccgggggccccgccaggcccggcgggcgctccgcggccgtcctccaggcggaacgtcacgccctcctccgcgcccgcgcggtgcctgccgaggaacgtcaccaggtgcggttgcagggggcagtcgggaaagtggctgtcgaggacgtatccctgcaccaagatctgtttgaagttcgggtggcgggggttggcgaagatgggctcgcggcgaaccagctccccggagctccaggccacgggagagatggtgcgacgctcaaggtcggggacgccaaacagaagcacctccgagacaacgccgctatttaactccaccagcgcccgatccggggcggagcatcgccttttttcgccggcggcgcgggaatcgagccagtcccggtcttgggtgacgagcgcctcctccgggcccggaacgcgcccgggcgcgaagtagcgcacgccggggttggggatggaccggatgaacgcccggaacgcctccggcgatcgccgcgccatcaggtcctcgtacgcggaggccgcgggggcgccggggtccgcggggtcgaacgcgtacttggctcggcacttaacctcgtagaaggccaggggggtctggggggcgggggccaggtagccgtgagggtccctggggcacacgaggatgtccagggacgcccccaccatgcccgtgtggccgtccatgaggaccccgcacgcgtgcacgttctcctcggcgaggtccccgggttggtgaaagacgaagcgcccggcgtcggcgtcgtcgttgacgcccgcgtccgcgcggcccacgcagtagcgaaacagcaggtttcgggccgtcggctcgttcacccgcccgaacatcaccgccgacgactgggcgtccagccgcaggctggcgttgtgggtgagccactgggacgagaagcacggaccctgcgcgccccaccgcagcgtggaggcggtcgtcaggccccgccgaagcagggcccagagctggcagtcggcctggttttgcgtcgccgcctcgtaaaatcccataagcgggcggggggcgacggcttcggcggcggacgggggggcgcggcgcgtcaggcgccagaggtgccggccgagcccgcggtccaccatgccggccgcctccagcgacacgacgagggagcacagatagtccaggcgagcccacaggggcccgatggccagaggggagcggacgccgcgcagcaggccgcgcaggtggcgctcgaacgtttccgccaagatatgggggggcagtgcgttggggatcgccgacgccgaccacatcgggtcggggtccgggggaccggggctgcagtccgggtcgatggcgtgtgcgccccccggcgagaggggaatgtcgggggttggcgggccggatgaggcctcagagagggccggggacgcgggccgggccttttcgcccggggccccgccgtcgggttgcccacgtggggggctctggggccaatgggaacccggggcccccggtgacgtggggcggggtggggcggggcggggcccaaagacggtcgccagatctaggctgttgggtcggggccgcttcgggggactatcggggtcgcgggcggggtccgcggggcgcttggcgccgggtgttgcggcggccgccatttttacgagcagccgaagagctcgagggcggaagggatcctcacgacagagagtggcgcgcggccgggttggcgtgacagaggcgggagaccagcaccagcagcggcctcagctcgggcggcagcgacaccgacgacaggacggccttgtgcgtgcgctggtaatttatacactgctccgtgaacgcgcgccgaatcttgggattgcgaaggtggcgccggatgccctccggcacgtcatacgccaggccgtgggtgttggtctcggccgagttgacaaagagggcggggtgcagaacgcagcgataggcgaggagggccacggcaaagtccggcgagagctggttgttaaagtactggtagcccgggacgcgggtcacggggacgcccaggctcggggccacgtacacgctaaccagcagctccagcagcgtctgccccagggcgtagagatcgaccgccagcccgacgtcgtgcttcagggggcggttgttaaactcggcccgctcgttgttgaggtactttaccgagagctccggtggctggttgtacccgtgccccaccagagtgtgaaagttggccgtggtcagggcggcgggcatcccaaacccccggggggactcgaggtccggctcctggaggcaaaactggccccgggatatcgtggagttggagttcagggtcaccaggctaaagtcggccaggacggccggccggagcgacaccgcgtccgatcgcagcatcacgaggacgttggcgcacttgatgtccaggtggctgatcccgcacctggtgttcaggaacaccacggcgcgcgccaggtctgtgaagcagtggtggagggccgtcgcgacggagggggtggtcgcgcgcagggacgccagctggccgatgtacttgccgaggtccatgtcgtacgcggggaacacgatctggcgctgctgcagcgagaacccgagcggggtgataaagccgcggatgtcgtgggtgcggccgccgcgaagagcgcactcccccacgagcagggtcgcgacgagctccacggcaaaccactctttttcccggatggtcttcacggcgagcttgtgttcgcgaatcaactgcacctcgccgtacccccccgagcccccgaagctgcgggccccggggatctccagggtcgtgtagcggagggcggggttgacggcgaatacggggatgcatagcttgtggatgcgcgcgagggacaggatgtgcgaggggggcgacgggggcgaggtcatggccgtctcggacctgcgcaggggcgggcgccttagcttggccgcagggccgggggcctcgggggacgagcggcgacgagacgagcggctcactcgccatcgggacagtcccgcgcgaagccgctcccggaagctggatcggcggcgggacccggggcgggctccggagacggcgccgtctcggggggaggggccgcttgggcgtccggacgcccggcggctgagggagtgtatgtaggacgcgagccaggccttgaaggagcgtcggtgtgcaccttgggggctgatgtcagctgccacatgactagcaggtcgctgtcgcccggactcatccatccgtccgccaggtcgccgtccccccacagagacgcgttcgccgcggcctcttcgagctgctcctcctggtccgcaagacgatcgtccgccgcgtccaggcgctcgctaagcgcgggatcgaggtaccgtcggtgtgcggttagaaaatcacgtcgcgccgcttgctcttccacgcgaattttaacacaggtcgctcgctgtcgcatcatctctaagcgcgcgcgggactttagccgcgcctccaattccaagtgggccgccttggcggccataaaggcgccaacaaacctaggatcttgtgtactcacgccctcccggtgtagctgcagggtctggtccctgtacacctcggcccggaggtgcgtctcggccaaacgtcggcgcagggccgcgtggctggcgtctcggctcatctcgccgcccccgcgcgcgcccgacgtcggactccttcgccccgacccccctgacctcagccgcccccgcctcgcccgcgatgtttggccagcagctggcgtccgacgtgcagcagtacctggagcgcctggagaaacagaggcaacagaaggtgggcgtcgacgaggcgtcggcgggcctgacgctcggcggcgatgcgctgcgcgtcccttttttggattttgccaccgcgacgcccaagcgccaccagaccgtggtcccgggcgtcgggacgctccacgactgctgcgagcactcgccgctcttctcggccgtcgcgcggcggttgctgtttaatagcctggtgccggcgcaactcagggggcgtgactttgggggcgaccacacggccaagctggagttcctggcccccgagctggtgcgggcggtggcgcgcctgcggtttcgggagtgcgcgccggaggacgccgtgccccaacgcaacgcctactacagcgtcctgaacacgtttcaggccctgcaccgctccgaagcctttcggcagttggttcacttcgtgcgggacttcgcccagttgttgaaaacctcgttccgggcctctagtctcgcggagactacgggccccccgaagaaacgggccaaggtggacgtggccacccacgggcagacgtacggcaccttggagctcttccagaaaatgatactaatgcacgcgacctactttctggccgccgtgctgctcggggaccacgcggagcaggtcaacacgttcctgcggctcgtgttcgagatccccctgtttagcgacacggccgtgcggcacttccgccagcgcgccaccgtgtttctagtccccaggcgccacggaaagacctggtttttggtgcccctcatcgcgctgtcgctcgcgtccttccgggggatcaagataggctacacggcccacatccgcaaggcgaccgagcccgtgtttgatgagatcgacgcctgcctgcggggctggtttggctcgtcccgggtggaccacgtcaagggggaaaccatctcgttctcgttcccggacggctcgcgcagcacgatcgtgtttgcctccagccacaacacgaacgtaagtacgccttcctcccgcggtgcctgtttccccggtgccgccctccccgagatcgaccgacagacaaacacagccagacgcgagtgtgggacgacacgcccgcagccccccccccgccatggcgggggggaagccttactgtttatttgtaatcggacgatgaggctctggccacggcccgcgcgaccgcggggcagctcgttgcaaacaggcggctggtatacgatgacagaacgcagaggcgccacccggcgctggtcgggcggatgacgctttccgcgccgtcccggcccacgacgacctcgtgcaggtgggccgtgatgcgcgggcggcgggtcgcctgccgcaggataaccgcgtccacggggtgcccgaagaggagctgacacaggctcgcgtccccccggacggccagggtgcgctgggccatattggaccacatgcacggggcgacgcagggacaggcctccgccacggcgggggcgcgccacagcgcgttggcggaatcgatgtgggccgtcggggcgcaggcgccgcctcctcccggggggtcggtaatcctggatagcagccatcctaaatggcgggcccggctgcccgggggacagagcgaccccaggtcatcatccatggcccagcagtatatgcggccgccggggaggtgccaccaggcccccggacccagggcacagcacgccccggattcgggggccgtgtccgtgggtaccaggtaggcgccgtcgagctcgtgggccacgggctcgtccgcgagctgttcggcggcggggtcgggggtttcctccgggggggaggcagcttccaggtggccgaaggctagggtgcacagcagcggggtccgggggtgcgttacgctgcggaggtggacggtggcgcagtagcggcgctcgcggttaaagaagaaaatggcaaagaacgtgttcgaaggcaggcgcagcgccttgggccgcgtcaggtacaggaagatctcgcagaaaagggcacgctcggggtcggggtccggaagggccacctggcacagcggctcggtgaggaccgtgaggcaccgaaaaatcttaagccgctcgtccccccgaacgacgcgccacacgaagacagagttggcgatgcgcgcgacgaggtcggcttcgggccccgggtcgggggcgcgcgcgtcggggggggcgccccggtgacccggcggggccgcggctcccggggggcctggcgtcgcctggggacgccagagtgcccgctgtgccaggttggtggtggggaagggaccggagacgcaccaaaagcagaggggccagcgcgtgtatgagttggggggggggtgggtgagcggtggaacaaaagcacgcgtcagcggacaaggccgggtcccgtagccgccccgcgacagaaccggagtccgacggcacgcgcgacggggtctgcgaggctgaggtacgccgcggtgttaatggtaaacgcaaagcctcccggaaagaccactagcccgcagaggcggcgattgaacccaaggcagaggtacgcgtagctctctcccggaaggtattgctcgcagaccctgtgtggggcagtggaggggctgccctccatgaagcgacatttactctgctcgcgtccattgacgtcaccgtcaatcaccactgcgattggacggttggtgaggcgcagcgtgtctccgctggtgctgtagtagtcaaacgcgtagtgggcgtcggagtcggcgaagcgggcggggatgtcgtcgctgagagggacgagccgccgccgccgcccccgaccgccctggccgcccagatgcgccagcacggccagggcgtacgcggtgtgaaagaacgcgtcgggggcggtcccctcgagggcgcgcatcaggttctccaggagcacggggaagcgccgcgtcacctcccctagccactcgctctggtgggggccaaagtcgtagcgcaggcgctggaagatgcgcgggccgccttggagcgcggcccggatagagtggcccagggcccgcagacacgcgatctggatgcgcgcgacgaaggccacctcggccgcgatgtcaaagggctgcagcacggggcgcgggtggcgcaggggtccctcgagcgcgggaaagcgacgcagcagcgccgtctgggccgcgggggacagctggtgggggcgcacgacgcgctcggcggcacaggcctccgtcagggccgtggccagctcggaggacagccgcggggggcgggcgcgtcgcccgccccacgccaccgaattctcgtaggagacgacgacgaagcgctgcttggtcccgtagtgatggcgcaggaccacggagatggagcgacggctccacagccagtcgggccggtcgccgccggccagagcttcccacccgcggtccagccactcgaccagcgatcgcggcttggcggtccccggcacgagggtgagcacgtcgttgaggacgtcctcgcccgcggcccgggggcccccccggctggcaaagcgccccccgccgggcggctccaggcccgccagcaccgcctccgcgtccgacgcgcccagggctcccccgctgacggcctggtggaccagggcgccctggcggagccccgaggcgacgccggaggccgcgtgcttggggcgcgcgcggaccgggtggcggcgggtgacgtcctgcacggcccgctggaccagcgcgaggatctcctcgttctcttgcgtgatggacacgtcctccgcggtggccgtgtcgcctcccggggccgtgagctgctcctccggggagatgggggggtctggggtgccgacaacggccggcccggccccgcccgagaccgaggacgcctggggagtgggggtgccgctttcccccatccccagggacaggtgggccgccgcctccgtcgcggcggcgggagccgcggcccccagccgcgcgacgtagcgacaaaagtggcgacagaggcgcatgaggcgcgcgccgtcggccgcgtatcgcgtgtttggcgggacgagctcgtcgtaactgaacaggagcacgcgggcacaggtcgcccacgggccccacgccaggcgcagcgccgcgaccgtgtacgggtcgtacacgccttgggcgtcgcacgcgaccggcagggagacgaacagcccgcccgcgctggggacgcgcggcaggaggtccgggtgcgccgggatgacgggggctaggatcgcccccaccgcatccgccggcacgtaggcggcaaacgccgaacgccacggggtgcagtcgccggtcgcgtgggcccgggtctgggtttcgacccggaagttcgcggccgccccaccgtcggggcggccgcgcacgagggcggacagcgggacccccgccgccgccaggcactcgctggagatgatgacgtgaatcagcgaggcggggctgctcgggtcccgggtgagatcgtattggacctcgttggcaaagtgcgcgttcatggcccggccggcggtgcgagcccttcccggtgccggaaggggcgtgggtggggggtgcgtgtgcgcgtcctcggggcccgcgggcgcacgtgcgcttatacgctgtgtgtttcgtctgtccccagggaatccggggccaggactttaacctgcttttcgtcgacgaggccaactttattcgcccggatgcggtccagacgattatgggctttctcaatcaggccaactgcaagatcatcttcgtctcgtcgaccaacaccgggaaggccagcacgagctttttgtacaacctccgcggggccgccgacgagctgctcaacgtggtcacctatatatgcgacgaccacatgccgcgggtggtgacgcacaccaacgccacggcctgttcctgctatatcctgaacaaacccgtgtttatcacgatggacggcgccgttcgccggacggccgatctgtttctgcccgactccttcatgcaggagatcatcggggggcaggcccgcgagaccggcgacgaccggcccgtcctaacaaagtcggcgggggagcggtttctgctgtaccgcccctccaccaccaccaacagcggcctgatggcccccgagctgtacgtgtacgtggacccggcgttcacggccaacacgcgcgcctccggcaccggcatcgcggtcgtcgggaggtaccgcgacgatttcattatcttcgccctggagcactttttcctccgcgcgctcacgggatcggcccccgcggacatcgcccgctgcgtcgtgcacagcctcgcccaggtgctggcgctgcaccccggggcgtttcgcagcgttcgcgtggcggtcgagggcaacagcagccaggactcggccgtggccatcgccacacacgtgcataccgagatgcaccgcatcctggcctcggcgggggccaacggcccggggcccgagctcctcttctatcactgcgagccgcccggcggcgcggtattgtaccccttctttctgctcaacaaacagaagacgcccgccttcgaatactttatcaaaaagttcaactccgggggcgtcatggcgtcccaggagctcgtctccgtgacggtgcgcctgcagaccgacccggtcgagtatctgtccgagcagctcaacaacctcatcgaaaccgtctctcccaacaccgacgtccgcatgtactccggaaaacgcaacggtgccgcggacgacctcatggtcgcggtcatcatggccatttacctggcggccccgaccgggatccccccggccttttttccgatcacgcgcacgtcttgagtctttcttgccgtttcttttgtttctctttctttccccccctctctccgcaataaacgccttcccggaactgtgtttccccccctacaacagtgttgtccgttggttgggtggttggggtgcgggggtgggcgggggaagcaagaaaacggtcggcgaacacaacatcgggaaaacggattcccgcacgtgcgtcttcccagattcgacacacacaccccccttctccttaaataaacacaaaccacacgctcgttggttggttaatgccagcgctttatttacgtcttgttttttttgcgtttcctccgcgggtcccttcccaacacgcctgcccccgcctcaggggtagcggataaccggggccatgtcgccggattgcacaacggcggcgccgtcgaacgtacacacccgaaccgccggggccagggccaggatgtccccgagttggcccgcgtgcgccagccaggcgaccagcgcctcgtaaagcggcagcctgcgttcgccgtcctgcatcagcatgggggcttcggggtggatgagctgggcggcttctcgcgtgacgctctgcatctgcaggagcgcgttcacgtatccgtcctgggcgctcagcgcgagcagccgggggatgagcgtgaggatgagggtggttccttcggttatggagtagaccatgttgaggacgagcgaccgcagctcggtgtttacggaggcgagttgctggacgtcggccacgagcgagagacgggccccgttgtaatacagcacgttgaggtcggggagctccccgggcgtccgggggtcggggttgaggtcccggatgccccgggcgaccagccgcgcgactatctcgcgggccaggggcgttgggagcgggaccggaaaccgcagcgtgaggtccagcgactccaggcgcacgtccgtcgcctggccctcgaagacgggcgggacgaggctgacgggatccccgttgcagaggtcgacgggggaggtgttgcggagattgacggtgccggcgtgcgtgagccccaggtccacggggcaggcgacgattcgcgtgggcagcacccgcgtgattaccgcggggaagcgcctgcggtacgccagcaacaaccccaacgtgtcgggactaactcctccggagacgaacgattcgtgcgccacgtccgcgagcgccagctggcggcggatggtcggcagaaagaccactcgaccctcgcaccgctgcagcgccgcggcatcggggcgcgagatacccgaggggatcgcgatgtctgcttcgaaacaatccgtgatcatggcgccgggccgcgagacaccggaacgcgggggtgcgggagggccggaaagcgcaacgcaaccgggacgatgatgaaacagagatggggggcaccgaccgtgtgggagagggggcggggcagggctcagcagcacgcacggggaggtctgtcgtgcgcaggagccccaggtgagaatcagtcccccggagctcgggtctgggttttattgggacctgccctcggaatcgcggctcccagtccaagcccccctggggggggcggggacagggggtgtgtgtgggtaaaagcaacgtcggaaaatcaaacccaatgccccaaacaggaaaaaaaaagacgggcgggtggagggaaagctggggaagaagaagccaattttacagagacaggccctttagcggggaggcgtcgtagatgagatactgcgtaaagtgggtctctcgcgcgtgggcctccccatcgcgggcgctgcgtagcagggcggggtcgctggcgcaggtgatcgggtaggcttcctgaaacaggccgcacgggtcttccacgagctcgcggcaccccggcgggcgcttaaactgcacgtcgctggcagcggtggccgtggataccgccgatcccgtttccacgatgagacgctccaggcagcgatgtttggccgtgatgtcggccgcggtgaagaacttgaagcaggggctgaggacgggcgaggccccgttgaggtgataggccccgttgtacagcaggtccccgtacgagaaccgctgcgacgcccacgggttggccgtggccgcgaagggccgcgccgggtcgctctggccgtggtcgtacatgagggctatgacgtccccctccttgtcccccgcgtacacgccgccggccgcgcgtccccgcgggttgcagggccggcgaaagtagttgatgtccgtggccacgggggtggcgatgaactcacacacggcatcctgcccgtggtccatgccggcgcgccgcggcacctgggcgcagccaaagaccgggaggggctgggccggccccagccggtttcccgccacgaccgcgttgcgcaggtacacggcggccgcgttgtctagcagcgggggggccccgcggccgaggtaaaagttttgggggaggttgcccatgtccgtaacggggttgcggacggtgcccgtggccgcgacggcggtgtagcccacacccaggtccacgtttccgcgcggctgggtgagcgtgaagttgacccccccgcccgtttcgtggcgggccacctggagctggcccagaaagtacgcctccgacgcgcgctcggaaaacagcacgttctcggtcacgaagcggtcctgccgcacgacggtgaacccgaacccggggtggaggcccgtcttgagctggtgatacagggccacggggctcatcttgaagtaccccgccatgagcgcgtaggtcagcgcgttctcccccgccgcgctctcgcgggcgtgctgcaccacgggctggcggatggaggagaagtagttggcccccagggccggggggaccagggggacgtcgcgcgccaggtcgcgcagggccggggggaagttgggcgcgttggccacgtggtcggcgcccgcaaacagcgcgtggacgggcaggacgtagaagtattcgccattttggatggtgtggtccaggtgctggggggccatgagcagcacgccggcgtgcagcgccccgtcgaagatgcgcatgttggccgtcgacgcggtgttggcgcccgcgtcgggcgccgcggagcacagcagcgccgtcgtgcgctcggccatgttgtgcgccagcacctgcagcgtgagcatggcgggcccgtcgacgacgacgcgcccgttgtggaacatgcgcttgaccgtgttggccaccagattggcgggatgcagcgggtgggcggggtcggtcacgggatcgctcgggcactcctcaccgggggcgatctccgggaccaccatgttctgcagcgtggcgtacacgcggtcgaagcggacccccgcggtgcagcagcgcccccgcgagaaggccggcaccagcacgtaatagtagattttgtggtggacggtccagtcggccggccggtgcggccggtcgtcggcggcgtcggccgcgcgggcctgggtgttgtgcagcagccggccgtcgttgcggttaaagtcggccgtcgccacgttgcacgccgccgcgtagacgggctcgtgcccccccgcgtcaatccggcagtctcggtggcggtccagggccgcgtgtcgcataaggccgtcgcagtcccacacgaggggcggcagcagcgccgggtcgcgcatcaggtgattcagctcggcctgagcctgcccgcccagctccgggcccggcagggtaaagtcgtccaccagctgggccagggcctcgacgtgggccaccaggtcccgatacacggccatgcactcctcggggaggtcgcccccgaggtaggtcacgatgtacgagaccagcgagtagtcgttcacgaacgccgcgcatcgcgtgttgttccagtagctggtgatgcactgagtcacgagccgcgccagggcgcagaacacgtgctcgttgccgtgaatcgcggcttgcagcaggtaaaacaccgccgggtagctgcggtcctcgaacgccccgcggacggcggctatggtagccggcgccatggcgtggcggccaacgccgagctccaggccccgggcgtcacgaaacgccaccggacacagcgccaggggcaggttgccgttgaccacgcgccaggtggcctggatcgcccccggaccggccggggggacttcgccgccgggaagctcgacgtcggccacgcccgcgaagaagtcgaacgcggggtgcagctccagagccaggttggcgttgtcgggctgcatgaactgctccgcggtcatctggcactcggcgacccaccggacccggccgtgggcgaggcgctgccgccaggcgttcagaaaacgctgctgcatgtccgcgccggggccggccggggccgcgacgtacgccccgtacggattcgcggcctcgacggggtcgtggttcacgcccccgacggccgcgtcgatgttcatgagcgaaggatgacacacggtcccgaccgcgttctccatggacagccgcagaacctggtggtcctttccccaaaaaaacagctgccggggagggaacgcgcggggctccgggtggccgggggcgggcaccaggtccccggcgtgcgcggcgaagcgctccatggccgggttgaacagccccaggggcaggacgaacgtcaggtccatggcgcccaccagggggtagggcacgttggtggcggcgtagatgcgtctctccagggcctccaggaagaccagcctgtcgcctatggccaccagatccgcgcgcacgcgcgttgtctggggggcgctttcgagttcatccagcgtctcccggttcgcctcgagttgctcctcctgcatatccagcaggtggcggcccacgtcgtccaggctccgcacggccttgcccatcaccagcgccgtgacgaggttggccccgttcaagaccatctcgccgtaggtcaccggcacgtcggcctcggtgtcctccaccttcaggaaggactgcaggaggcgctgtttgatggcggcggtggtgaccagcaccccgtcgaccggccgcccgcgcgtgtcggcgtgcgtcaggcggggcacggccacggacggctgcgtcgccgtggtcaggtccacgagccaggcctcgatggcctcgcggcgatggcccgccttgcccaggaagaagctcgtgtcgcaaaagctccgcttcagctcggcgaccagggtcgcccgggcaaccctggtcgccaggcgcccgttgtcgagatatcgttgcatgggcaacagcagggccaggggaggcgccttctccaacagcacgtgcagcatctggtcggccgtgccgcgctcaaacgcccccaggacggcctggacgttgcgcgcgagctgctggatggcgcgcagctggcgatgcaggctaatgcccgtcccgtccagggcctcccccgtgagcagggcaatggcctcggtggccaggctgaaggcggcgttcagggcccggcggtcgatgaccttcgtcatgtaattatgcacgggctgctcgacggggtgcgggccgtcgcgggcgatgaggggctggtggacctcgaactgcacacgcccttcgttcatgtaagccagctccgggaacttggtgcacacgcacgccacggacaggccgagctccagaaagcgcacgagcgacagggtgttgcagtaggaccccagcagggcgtcaaactctacgtcatacaggctgttttcgtcggagcgcacggcggcgaaaaaatcaaagagtctgcggtgggacgccacctcgatcgtactcaggatggagccggtgggcaggatggccgcggcgtaccggtaacccggggggtcgcgggcaggagcggccattgggttccttgggggattcgcaggctccatcaagccgagctcgggaaggccaagcccctcccgcacaacgcctcaccgccggcggacgcgactaacaacccacgggccgccaaaaccccaaggggcaacccgaccaacaacaggcgaggggaggaaaggcgtaaagggggcgttgggaggcaaaaagaaagaaaacacccagacgtaggcccgaggaccggccggcgtcctctgtccccgagcacccactgtgcccaacaggcacgggggcgagctgcccctgccttatatacccccccgccacacccccgttagaacgcgacgggtgccttcaagatggccctggtccaaaagcgtgctagaaaaaagttggtaaaggcggcaaagcagtccgccgccgccacccacatggcggcgccggccgcgcaggcgattcccagagaacgggcgcggaggggatccgtgcggggcagcagctggctggcggtgatccaatggaaaagcccgtcgggactgaacgtctcatgggcggccgccaccagggcgcacagggccgcgccgcccatgatcacgcacaacccccaaaacacgggtggcgacaacggcaggcgatcccgtttgatgttcacgtacaggaggagcgcccgtgccagccacgtgacatagtaggcgaggacggcggctataatacatgccggcgccaccgcccgtccggtccacccgtaatacatgcccgcggccaccagctccagcggcttgaggaccaggaacgaccaagcaaacatcaccacccgcttggaaaagaccggctgggtgtggggcggaagacgcgagtaggccgaactgacaaaaaaatcagacgtgccgtacgaggacagcgaaaactgttcatcgagcggcagttctccgtcctccccgccacacgcggcctcgtctaccagctcgcgatccaacaaaggaacatcatcccgcattgtcatggtcggtgcggggagccggcgaggcagcaaaaccgaaagtagtgctggcggcgcgggcccgggtccggacccaagcttcagggatggggggcggaggccaaaatcaaacaagcaccgcgcgggttctacacacaacccccacccgggtagtatccgcggatgcgagtgcctggcgaagtcacgtcccagcaggatataaacctcggccgttgggcccggaacccccgaaattcacacccacgccctgacgcccaaatcatgggtggatgtggttcgcgagccgcacatccgtgcgtccgccctcccccgcgggctgatgacgtggcggttagtcagtgggaaggcagggggaaagatgggttgggggaggaaacgaagaaaacacccagagggccacgtcgggaatgcgcccggagttgtccttaaaaggccggccgtgcgtgacggaagccgtcgtttgcccaagcaccgacgccgcgatccacagtggggggagttcctccgtccggccacaaccctacgcgcgggcggcacgcgcgagagcaacccacgggtcccgttcgcgccaccgccagcccttgctcccaccaccctcctcccaccaccccactattcccccccccaagtccgccccgtggctcgccggccatggagctcagctatgccaccaccctgcaccaccgggacgttgtgttttacgtcacggcagacagaaaccgcgcctactttgtgtgcggggggtccgtttattccgtagggcggcctcgggattctcagccgggggaaattgccaagtttggcctggtggtccgggggacaggccccaaagaccgcatggtcgccaactacgtacgaagcgagctccgccagcgcggcctgcgggacgtgcggcccgtgggggaggacgaggtgttcctggacagcgtgtgtctgctaaacccgaacgtgagctccgagcgagacgtgattaataccaacgacgttgaagtgctggacgaatgcctggccgaatactgcacctcgctgcgaaccagcccgggggtgctggtgaccggggtgcgcgtgcgcgcgcgagacagggtcatcgagctatttgagcacccggcgatcgtcaacatttcctcgcgcttcgcgtacaccccctccccctacgtattcgccctggcccaggcgcacctcccccggctcccgagctcgctggagcccctggtgagcggcctgtttgacggcattcccgccccgcgccagcccctggacgcccgcgaccggcgcacggatgtcgtgatcacgggcacccgcgcccccagaccgatggccgggaccggggccgggggcgcgggggccaagcgggccaccgtcagcgagttcgtgcaagtgaagcacatcgaccgtgttgtgtccccgagcgtctcttccgcccccccgccgagcgcccccgacgcgagtctgccgcccccggggctccaggaggccgccccgccgggccccccgctcagggagctgtggtgggtgttctacgccggcgaccgggcgctggaggagccccacgccgagtcgggattgacgcgcgaggaggtccgcgccgtgcatgggttccgggagcaggcgtggaagctgtttgggtcggtgggggctccgcgggcgtttctcggggccgcgctggccctgagcccgacccaaaagctcgccgtctactactatctcatccaccgggagcggcgcatgtcccccttccccgcgctcgtgcggctcgtcggtcggtacatccagcgccacggcctgtacgttcccgcgcccgacgaaccgacgttggccgatgccatgaacgggctgttccgcgacgcgctggcggccgggaccgtggccgagcagctcctcatgttcgacctcctcccgcccaaggacgtgccggtggggagcgacgcgcgggccgacagcgccgccctgctgcgctttgtggactcgcaacgcctgaccccgggggggtccgtctcgcccgagcacgtcatgtacctcggcgcgttcctgggcgtgttgtacgccggccacggacgcctggccgcggccacgcataccgcgcgcctgacgggcgtgacgtccctggtcctgaccgtgggggacgtcgaccggatgtccgcgtttgaccgcgggccggcgggggcggctggccgcacgcgaaccgccgggtacctggacgcgctgcttaccgtttgcctggctcgcgcccagcacggccagtctgtgtgagatatcccaataaagtgcagtcgttttctaacccacggatgccgttgtatgcctatacgggggactatggggggggaaaggaaaggaaacaggaatggagaagggaaaggaacagaggcggtagcggacgcacggcggacacaataacaaacagaccgcggacacggagggagtcggttgggttgggcgtggacgccgctgcgtccacacacccgtttattcgcgtctccacaaaaatgggacgcacgttcggaccaccctaaggatgcccgccagggccgcggtaatcataacgacccccagcgcggacgcggccagaaacccgggggcgatggtggcgatgggcagcgtgtcaaaggccagcagatgaatcacagttccgttggggaacaacaacagggccacggacggcacgtcgctggaaaacacgttcggggtgcccgccaccggcccctgggccagctgctgttgggtggcatccgtgtccaccagcagcaccgacatgacctccccggccggggtgtagcgcagaaacacggcccccacgaggccgaggtcgcgccggttttcggtgcgcaccagccgcttcggctcaatctcccgcgcgtgcccttcgcaggtggcggtgagataggtgataaacagcgggcggcggacgtcaacgcccgtaagcttgtatccgatcccgcggggcaagggggtgtgggtgacgacgtagctggcgttgtgggtgatgggcacgaggatccggggctccgcgttgtgcgacgggccgctacactggtgggtggcctccgggacgaaggcgcggatcagggcgttgtagtgcgcccagcgcgtgagaacggaggccacgccgcgggtctgttgtgccatgacgtccgccgggatgtcggatcgggtggccatggccagcgcgtccaggatgaacccgccctcggcgagatcgaagcgcagggaagctgcgcatggggaaaagtggtccgggagccagaagaggtttttctggtggtcggtcctggctagcgcggcccggagatcggcgtgggtcgccgcggcgacgtcggacgtacacagggccgtggttatgaggaggccccggcgggcgcgttcccgctgctcggccgagggcgcgcccgccaggaacggcgcccggaggacggccgtggcgtaaaacagcgctcggcggaccatcggggcggttagcgcgcggccgccgagaaactcggcgtacagggcgtcgatcaggcgggccgcgctcggggccaccgcgccataggccgcggggctgtccaacacgaacgccagctgatagcccagcgcgtgcgccaccaggctctgctctcgctcgaggatcgcggccaccagatgcccgaggcgcgcctccagccgcaggcgggccgccgggtccaacacggacacgttcaggaacaccgagtcggccgcgcagcccgctgctccccgggcggccaggccggccagcacgcgcgagtgggccaaaaagcccagcaggtcggagaggcgaatcgcgtcgtgggcgtgggccgcgttgacgaacgcaaaccccgacgaggcgagcagccccgcgaggcgccagaacagggacggacgcgcgtccgtgccggagcccgggtcctcccccaaaaactccgcataggcccgcgacatatactgggcgtagttcgtgctctcctcggggtagccggccacccgccggagggcgtccagcgccgagccgttgtcggcgggcgtcggggcccccaggacaaagacgcgatacctggggccggccggaggcccggggagcaccgcgggggcgttttcgtcggtcggatttccgacccgagcgagggtcttgtccgcaggcaccactatgatctcggccggagggctgtcccgcatcgatatcacgagccccatgaagcccttcccgtatcgcgcgcgcacgagcgcggcgtcgcacccgaacgccagcccgcccgtcgtccagacgcccacgggccacgtcgaggccgacggggagaggtacacgtaccgacccggagtccgtagcaggcccctggcggccagccaggtcacggatgcgttgtgcagatgcgcgatgctcaggttcgtcgtcggatgcctcggtgtccccgcgggcggccccgggggcggcgcgttgcgtcggccgtccgggtgcctctcggtcgccccgtcgtctccccgcgggaacgtaagcccctcgcggtccggcgcggccgcgaatgttacccaggcccgggaccgcaacagcgcggaggcgccggggttgtgcgacagtcccttgagctgggtcacctcggcggggggacgggacgtgggccccgcctcggggagctcgggcaggctcgcgttccgaggccggccgagcagataggtctttgggatgtaaagcagctgcccggggtcccgaggaaactcggccgtggtgaccaacacgaaacaaaagcgctcggcgtaccaccgaagcatgggcacggatgccgtagtcaggttgagttcgcccgggggcgccaagcgtccgcgctgggggtcgctggcgtcgggggtgttgggcaaccacagacgcccggtgtttgtgtcgcgccagtacgtgcgggccaaccccagaccgtgcaaaaaccacgggtcgatttgctccgtccagtacgtgtcatggcccccggcaacgcccaccaggacccccatcaccacccacagaccggggcccatggtcgtcgtcccggctgccagtccgcagatgggggggggtgtccgtacccacggcccaaagaggctccgcacctcggaggctatcggaggccctttgttgccgtaagcgcgggccaaaggatggggtggggtgagggtaaaagcacaaagggagtaccagaccgaaaacaaggacggatcggcccgctccgtttttcggtggggtgctgatacggtgccagccctggccccgaacccccgcgcttatggacacaccacacgacaacaatgccttttattctgttcttttattgccgtcatcgccgggaggccttccgttcgggcttccgtgtttgaactaaactccccccacctcgcgggcaaacgtgcgcgccaggtcgcgtatctcggcgatggacccggcggttgtgacgcgggttgggatcatcccggcggtgaggcgcaacagggcgtctcgacacccgacgggcgactgatcgtaatccaggacaaatagatgcatcggaaggaggcggtcggccaagacgtccaagacccaggcaaaaatgtggtacaagtccccgttgggggccagcagctcgggaacgcggaacagggcaaacagcgtgtcctcgatgcggggcagagaccccgcgccgtcctcggggtcggggcgcggggtcgccgcggcgacccccgtcagccggccccagtcctcccgccacctcccgccgcgctgcaggtaccgcaccgtgttggcgagtagatcgtagacacggcgaatggcggacagcatggccaggtcaagccgctcgcccgggcgttggcgtctggccaggcggtcggcgtgttcggcctccggaaggacacccaggaccaggttcgtgccgggcgcggtcgggggcatgagggccacgaacgccaacacggcctggggggtcatgcttcccatgaggtaccgcgcggccgggtagcacagcagggaggcgatagggtgccggtcgaaaacaagggtgagggccgggggcggggcttgcgggcccacagcctcccccccgatatgaggagccaaaacggcgtccgtcgccgcataaggcgtgctcattgttatctgggcgctggtcattaccaccgccgcctccccggccgatatctcgccgcggtccagacggtgctgcgtgttgtagatgttcgtcagggtctcggaggcccccagcacctgccagtaagtcatcggctcggggacgtagacgatattgtcgcgcggccccagggcctccatcagctgcgcggaggtggtggtcttccccaccccgtggggtccgtctatataaacccgcagcagcgtgggcagctccggatccccgcgggctccggaggccccctggcgatggctaggacgggacgccgcgcggccgtcggtaggcccgctcgcacgagcagcctgaccgaacgcaggcgcgtgctgttggccggcgtgagaagccatacccgcttctacaaggcgttcgcccgagaggtgcgggagttcaacgccaccaggatttgtggaacgctgctgacgctgatgagcgggtcgctgcagggtcgctcgctgttcgaggccacgcgcgtcaccttaatatgcgaagtggacctcgggccgcgccgcccagactgcatctgcgtgttcgaattcgccaatgacaaaacgttgggaggtgtgtgcgtcatcctggagctaaagacatgcaaatcgatttcttccggggacacggccagcaaacgcgaacagcggaccacgggcatgaagcagctgcgccactccctgaagctgctgcagtcgctcgcgcctccgggggacaaggtcgtctacctgtgtcctattttggtgtttgtcgcgcagcgtacgctgcgcgtcagccgcgtgacccggctcgtcccgcaaaagatctccggcaacatcaccgcggccgtgcggatgctccaaagcctgtccacgtatgccgtgccgccggaaccgcagacccggcggtcgcggcgccgggtcgccgcgaccgccagaccgcaaaggcccccctccccgacacgtgacccggaaggcacggcgggtcatccggccccaccagagagcgaccccccctccccaggggtcgtaggcgtcgctgcggagggtgggggtgtgcttcagaaaatcgcggcgcttttttgcgtgccggtggccgccaagagcagaccccggaccaaaaccgagtgaggttctgtgtgttgtttttttttttttttttcctcgttttgttttctcttctttcccccccccctcccccgcttctggccaagcatcctcacctgcttaagcggaacccgcgggcgcgcggggactcatttgtcgccggcgacacccacccgacaacagcccctgggtgtcgaccgctgtcgcccccgtctgtcgcctctcccttttttccccccctcaaagaacgtggtgttgggcgccggccaattcttcccggagcgccgtcgtcgcccgcccgccgccctcgaacatggacccgtactaccctttcgacgcgctggacgtttgggaacacaggcgcttcatcgtcgccgactccaggagcttcatcacccccgagttcccccgggacttctggatgttgcccgtgttcaacatcccccgggagacggcggcggagcgggcggcagtgctgcaggcccagcgcaccgcggccgcggcggccctggagaacgccgccctccaggccgccgagctgcccgtcgacatcgagcgccggatacgcccgatcgagcagcaggtgcatcacatcgccgacgccctggaggcgctggagaccgcggcggccgcggccgaagaggcggatgccgcgcgggacgccgaggcgaggggggagggcgctgcggacggggcagcgccgtcgcccaccgcgggccccgccgccgcggagatggaggttcagatcgtacgcaacgacccgccgctacgatacgataccaacctccccgtggatctgctacacatggtgtacgcgggccgcggggccgcgggttcgtcgggagtcgtctttggtacctggtaccgcacgatccaggaacgcaccatcgcggacttccccctgaccacccgcagcgccgactttcgagacgggcgcatgtccaagaccttcatgaccgcgctggtcctgtctctgcagtcgtgcggccggctgtacgtgggccagcgccactattccgccttcgagtgcgccgtgctgtgtctgtatctgctgtaccgaaccacccacgagtcctcccccgatcgcgatcgcgctcccgttgcgttcggggacctgctggcccgcctgccgcgctacctggcgcgtctggccgcggtaatcggcgacgagagcggacgcccgcagtaccgctaccgcgacgacaagctgcccaaagcgcagttcgcggcggccggcggccgctacgagcacggggccctggccacccacgtcgtgatcgccacgttggtgcgccacggggtgctaccggcggccccgggcgacgttccccgagacaccagcacccgcgtgaaccccgacgacgtggcccaccgcgacgacgtcaaccgcgccgccgccgcgtttttggcacgcggccacaacctcttcctgtgggaggaccagacgctgctgcgggcgaccgccaacaccattacggccctggccgtgcttcggcggctcctcgcgaacggcaacgtgtacgcggaccgcctcgacaaccgcctgcagctgggcatgctgatcccgggagccgtcccggcggaggccatcgctcggggggcgtccggattggactcgggcgccataaaaagcggcgacaacaacctggaggcgctgtgcgttaactatgtacttccgctgtatcaggcagaccccacggtcgagctgacccagttgtttccggggctggccgccctgtgcctggacgcccaggcggggcggccactggcgtcgacgaggcgcgtggtggatatgtcgtcgggcgcccgccaggcggcgctcgtgcgcctcaccgcgctggagctcatcaaccgcacccgcacaaacaccacccctgtgggggagattattaacgcccacgatgccttggggatacaatacgaacaggggcctgggctgctcgcccagcaggcacgcatcggcttggcgtcaaacaccaagcgattcgccacgttcaacgtgggcagcgactacgacctgttgtactttttgtgtctcgggttcattccccagtacctgtccgtggcctagggaagggtgggggtggtggtggtggggtgtttttctgttgttgtttctggtccgcctggtcacaaaaggcacggcgccccgaaacgcgggctttagtcccggcccggacgtcggcggacacgcaacaacggcgggccccgtgggtgggtaagttggttcgggggcatcgctgtattcccttgcccgcttccaccccccccccccttcccgttttgtttgtttgtgcgggtgcccatggcgtcggcggaaatgcgcgagcggttggaggcgcctctgcccgaccgggcggtgcccatctacgtggccgggtttttggccctgtacgacagcggggacccgggcgagctggccctggacccagacacggtgcgtgcggccctgcctccggagaaccccctgccgatcaacgtagaccaccgcgctcggtgcgaggtgggccgggtgctcgccgtggtcaacgaccctcgggggccgttttttgtggggctgatcgcgtgcgtgcagctggagcgcgtcctcgagacggccgccagcgccgctatttttgagcgccgcggacccgcgctctcccgggaggagcgtctgctgtacctgatcaccaactacctgccatcggtctcgctgtccacaaaacgccggggggacgaggttccgcccgaccgcaccctgtttgcgcacgtggccctgtgcgccatcgggcggcgccttggaaccatcgtcacctacgacaccagcctagacgcggccatcgctccgtttcgccacctggacccggcgacgcgcgagggggtgcgacgcgaggccgccgaggccgagctcgcgctggccgggcgcacctgggcccccggcgtggaggcgctcacacacacgctgctctccaccgccgtcaacaacatgatgctgcgtgaccgctggagccttgtggccgagcggcggcggcaggccgggatcgccggacacacgtaccttcaggcgagcgaaaaatttaaaatatggggggcggagtctgcccctgcgccggagcgcgggtataaaaccggcgccccgggtgccatggacacatcccccgccgcgagcgttcccgcgccgcaggtcgccgtccgtgcgcgtcaagtcgcgtcgtcgtcttcttcttcttcttttccggcaccggccgatatgaaccccgtttcggcatcgggcgccccggcccctccgccgcccggcgacgggagttatttgtggatccccgcctctcattacaatcagctcgtcaccgggcaatccgcgccccgccacccgccgctgaccgcgtgcggcctgccggccgcggggacggtggcctacggacaccccggcgccggcccgtccccgcactacccgcctcctcccgcccacccgtacccgggtatgctgttcgcgggccccagtcccctggaggcccagatcgccgcgctggtgggggccatcgccgccgaccgccaggcgggtgggcttccggcggccgccggagaccacgggatccgggggtcggcgaagcgccgccgacacgaggtggagcagccggagtacgactgcggccgtgacgagccggaccgggacttcccgtattacccgggcgaggcccgccccgagccgcgcccggtcgactcccggcgcgccgcgcgccaggcttccgggccccacgaaaccatcacggcgctggtgggggcggtgacgtccctgcagcaggaactggcgcacatgcgcgcgcgtacccacgccccctacgggccgtatccgccggtggggccctaccaccacccccacgcagacacggagacccccgcccaaccaccccgctaccccgccaaggccgtctatctgccgccgccgcacatcgcccccccggggcctcctctatccggggcggtccccccaccctcgtatcccccagttgcggttacccccggtcccgctcccccgctacatcagccctcccccgcacacgcccacccccctccgccgccgccgggacccacgcctccccccgccgcgagcttaccccaacccgaggcgcccggcgcggaggccggcgccttagttaacgccagcagcgcggcccacgtgaacgtggacacggcccgggccgccgatctgtttgtgtcacagatgatggggtcccgctaactcgcctccaggatccggacttggggggggtgtgtgttttcatatattttaaataaacaaacaaccggacaaaagtatacccacttcgtgtgcttgtgtttttgtttgagaggggggggtggagtgggggggaaagtgggccgaatgacacaaaaattaggtcggaggggtgaggggggggggctaggagccgaaccgatggcccccacacgcgacggaaggcccggaagactaccacggggagggggtgtggaaagcgaccggtcgcagggagacggggttggtttggggttggtttggggttggttttcccgttagcacatgtctgcatttgtttttctagtcacacgcccccccccccccaaataaaaaccaaggcaaaacaataccagaagtcatgtgtatttttgaacatcggtgtctttttatttatacacaagcccagctcccctcccctcccttagagctcgtcttcgtctccggcctcgtcctcgttgtggagcggagagtacctggctttgttgcgcttgcgcagaaccatgttggtgaccttggagctgagcagggcgctcgtgcccttctttctggccttgtgttccgtgcgctccatggccgacaccaaagccatatatcggatcatttctcgggcctcggccaacttggcctcgtcaaacccgcccccctccgcgccttcctccccctccccgcccacgcccccggggtcggaagtcttgagttccttggtggtgagcggatacagggccttcatgggattgcgttgcagttgcaggacgtagcggaaggcgaagaaggccgcgaccaggccggccaggaccagcagccccacggcaagcgccccgaaggggttggacataaaggaggacacgcccgagacggccgacaccacgccccccactactcccatgactaccttgccgaccgcgcgccccaagtcccccatcccctcgaagaacgcgcacagccccgcgaacatggcggcgttggcgtcggcgcggatgaccgtgtcgatgtcggcaaagcgcaggtcgtgcagctggttgcggcgctggacctccgtgtagtccagcaggccgctgtccttgatctcgtggcgcgtgtagacctccaggggcacaaactcgtggtcctccagcatggtgatgttcaggtcgatgaaggtgctgacggtggtgacgtcggcgcgactcagctggtgagagtacgcgtactcctcgaagtacacgtagcccccgccgaagatgaagtagcgccggtggcccacggtgcacggctcgagcgcgtcgcgggtgaggcgcagctcgttgttctcgcccagctgcccctcgatcagcgggccctggtcttcgtaccgaaagctgaccagggggcggctgtagcacgtccccggccgcgagctgacgcgcatcgagttctgcacgatcacgttgtccggggcgacgggcacgcacgtggagacggccatgacgtctccgagcatgcgcgcgctcacccgccggccgacggtggcggaggcgatggcgttggggttgagcttgcgggcctcgttccagagagtcagctcgtggttctgcagctcgcaccacgcgacggcgatgcgccccagcatgtcattcacgtggcgctgtatgtggttatacgtaaactgcagccgggcgaactcgatcgaggaggtggtcttgatgcgctccacggacgcgttggcgctgggcgcctcccgcagtggcgcgggcgtggcattccggggcttgcggtcctgctcccgcatgtactcccgcacgtacagctcggcgagcgtgttgctgaggaggggctggtacgcgatgaggaagccccccgtggccaggtagtactgcggctggcccaccttgatgtgcgtggcgttgtacttgcgcgcaaacatgcggtcgatggcctcgcgggcatcccggccgatgcagtcgcccaggtcgacgcgcgagagcgagtactcggtcaggttggtggtgaaggtggtcgagatggcgtcggaggagaagcggaaggagccgccgtactcggcgcggagcatctcgtccacctcctgccacttggtcatggtgcagaccgccggtcgcttcggcacccagtcccaggccacggtaaacttgggggtcgtcagcaagttgcgggtcgtcggcgacgtggcccgggccttcgtggtgaggtcgcgcgcgtagaagccgtcgacctgcttgaagcggtcggcggcgtagctggtgtgctcggtgtgcgacccctcccggtagccgtaaaacggggacatgtacacaaagtcgcccgtcgccagcacaaactcatcgtacgggtacaccgaccgcgcgtccacctcctcgacgatgcagttgaccgtcgtgccgtaccgatggaacgcctccacccgcgaggggttgtacttgaggtcggtggtgtgccacccccggctcgtgcgcgtggcgaccttcgccggcttgagctccatgtcggtctcgtggtcgtcccggtgaaacgcggtggtctccatgttgttccgcacgtacttggccgtggagcggcagacccccttggtgttaatcttgtcgatcacctcctcgaagggaacgggggcgcggtcctcgaatatccccataaactgggagtagcggtggccgaaccacacctgcgacacggtcacgtctttgtagtacatggtggccttgaatttgtacggggcgatgttctccttgaagaccaccgcgatgccctccgtgtagttctgcccctccgggcgcgtcgggcagcggcgcggctgctcaaactgcaccaccgtggcgcccgtcgggggcgggcacacgtaaaactgggcatcggcgttctcgaccttgatttcccgcaggtgcgcgcgcagcgtggcgtggccggcggcgacggtcgcgttggcgtcggggggcggggtcgcctcgggccgcttgggcggctttttggttttccgcttccgggccttggtggtcgcggggctcgggacggggggcggccgggaggcgggacccccgttcgccgcgacggtcgcggccacgccgcccgaggcgcggggggccgccggggccgccggggccgccgacgccaccgcggccaccagcgcccccacgaccagcgcgcaaatcaagccccccccgcgcatggcgggcctacgggggcgcgtcgctcccgccgcccgctagtctgggggcgaggtgctgcaggaccgagtagaggatggaaaaaacgtctcggtcgtaaaccacgaccgagcggggtccgatgcagccgtcggggccgctctcgacgatggccaccagcggacagtcggagttgtacgtgaggtacacgcccggcgggtagcggtacagaccttcggaggtcgggcggctgcagtcggggcggcgcaactcaagctccccgcaccggtagaccgacgcaaagagtgtggtggcgataatgagctcgcgaatatatcgccaggcggcgcgctgggtgggcgtgattccggaaacaccgtcaaaacagtagaacttttgaaactcgctgacggcccaatcagcgcccgaaccccccgcgcccatgatgaagcgggcgagttcctccttgaggtgcggcaggagccccacgttctcgacgctgtagtacagcgcggtgttggggggctgggcgaagctgtgggtggagtggtcgaacaggggcccgttgacgagctcgaagaagcgatgggtgatgctggggagcagggccgggtccacctggtggcgcagcagcgacgctcgcatgaaccggtgcgcgtcaaacacgcccggggcggcgcggttgtcgatgaccgtgcccgcgcccgccgtcagggcgcagaagcgcgcgcgcgccgcgaagccgttggcgaccgcggcgaaggtcgcgggcagcacctcgccgtggacgctgacccgcagcatcttctcgagctccccgcgctgctcgcgcacgcagcgcccgaggctggccagcgaccgcttggtcaggcggtccgcgtacagccgccggcgctcccgcacgtccgcggcggcccgcgtcgcgatgtcgccccagctctccggcccctgcgcccctggctcggggccgcgctccccgtcctcgctcgcgggcgtccccgcgccacgcctccgccccccctcctccgcggcggcccggggctcttcctcctcggcccccccggtcgcgccgccggcccccagccgcgccagcacgcggcgcagcgcctcctcgtcgcactgctcggggctgacgagccgccgcagcagcggcgtcgtcaggtggtggtcgtagcacgcgcgtatcagcgcctcgatctgatcgtcgggcgacgtcgcctggccgccgatgatcagggcgtccaccatgtccagcgccgccaggtggcccccgaacgcgcgatcgaagtgctccgcccgccgcccgaacagcgccagctccacggccaccgcggcggtctcctgctgcagctcgcgctgcgccagcgcgttcaggttgtcggcgaaggcgtccatggtggagtggcgggcgcgatcgccggacgccagccagaagcgcagctcgctgatggcgtacaggccgggcgtagtggcctgaaacacgtcatgcgcctccagcagggcgtcggcctcctcgcggacagaagagctatcggcgggcggcgggccggccctggccccgccgcccgccgcggtccgcgccagcgcctggtccagcacacagagcgctcgcgcgcgggcggcgtccgacagcccggcggcgtggggcaggtaccgtcgcagctcgttggcgtccagccgcacctgggcctgttgggtgacgtggttacagatgcggtccgccaggcggcgggcgatggtcgccccttggttcgcggtgacgcacagctcctcgaaacagaccgcgcacgggtgggacgggtcgctcagctccgggggcacgatgaggcccgaccccaccgccgccaccataaactcccggacgcgctccagcgcggccgtggcgccgctcgggggggtgatgaggtggcagtagttcagctgcttgagaaaattctcgacatcatgcaggaagcacagctccatgcggacgtccccgccgtacgtctgcagccggatctgctggtggtacggacagggtcgggccagacccatggtctcggtgaaaaaggcagagacgtcacccgtggtcgcgaacgtttccaggtggcccaggagccgctccccctcgcgccacgcgtactccaggagcaactccagggtgaccgacagcggggtgagaaaggcggcggcctgagcctccagccccggccgcaggtgccgccgcagcacgcgcacctggagcgcgttgagttttagctgggcgagcttccccaggccgatctgggggtcgcatcgtcgaagcagctctagctgaaaaacgtacgtctgtacctgcccgagcagggccaacagtttctgtcgggccgcagtgggctcggaaaccgcggccgggggcgcggccgccatggcgagtcacccggccgtgctgtggtttagttaaggtttgggggggggtgggtcagaggcgcgccccgcgcggactgatgcggcggcgggcccctgacatcccctctttatgcccgtcgcccgcccgcccgccccgccggtgtgccgtgattcgcggagtcggggccttgtgtttctttctttcccccccgaatccgttctttcttcctcacccccccctccccacacacccacccaggactcgccaccacaaggaggcgagagcccgtcgctaacccaaagacacagtcacgagacacgatatcgactgtagttgcgatcgtttattttatacacaacaccaacctttccttcgaccccccccacccccgcccctagagcatatccaacgtcaggtcctttttctccggtggtccctccccaaacggatcgtcgccgtgaaacgcccgctttcgggcgacgccggccgcccccgccgccgccgccaaaccgccgaacgacgccgcgtggtcatcctcgtcgccgaaatccccaaagttaaacacctccccggcggcgccgagctggctgaccagggcctccgcctcgtgggccacctccagggccgcgtcggtcgaccactcgccatgcccgcgctccagggcgcgggtggtaaactccatcatttcctcgctcaggtactcgtcctccagcagcgccagccagtcctcgatctgcagctgctgggtgcgggggcccaggctcttgacggtcgccacaaacacgctgctggcgaccgccgccccgccctccgcaatgatgccccggagctgctcgcacagcgaatgctcgtgggccccgcccccgagactcgacgccgcgcacacaaacccggccctggggcaggccaggacaaacttgcgggtgcggtcaaagatcagcagcgggcacgcgtttttgccgcccagcaggctggcccagttcccggcctgaaacacgcggtcgttgccggccatgccgtagtatttgctgatgctgaggcccagcacgaccatcgggcgcgcggccatcacgggccgcagcaggttgcagctcgcgaacatggacgtccaggcgccggggtgcgcgtcgagggagtccatcagcgcgcgggccccggcctccaggcccgcgccgccctgcggggcccaggcggccgccgcctgcacgctggggggacggcgggacccggcgatgacggccgtgagggtgtttatgaagtacgtcgagtggtcgcagtacctcaagatctggttggccatgtagtacatggccagttcgctcacgttattgggggccaggttgataaagttaatcgcgccgtagtccagggagaacctcttaatgaacgcgatggtctctatgtcctcgcgcgacaagagccgggcggggagctggttgcgctggagggcggtccagaaccactgcgggttcggctggttcgaccccgggggcttgccgttgggaaagatgaccgcgtggaactgcttcagcaggaagcccagcggtccgaggaggatgtccacgcgcttgtcgggcttctggtaggcgctctggaggctggcgacccgcgccttggcggcctcggacgcgttggcgctcgcgcccgcgaacaacacgcggctcttgacgcgcagttccttgggaaacccaagggtcacgcgggcaacgtcgccctcgaagctgctctcggcgggggccgtctggccggccgttaggctgggggcgcagatagccgccccctccgagagcgcgaccgtcagcgtcttcgccgacaggaacccgttgttgaacaggtccatgacgcgccgccgcagcaccggttggaattgattgcgaaagttgcgcccctcgaccgactgcccggcgaacaccccgtggcactggctcagggccaggtcctggtacacggcgaggttggaccgccgcgcgaggagctgcagcagggggcacggcccgcaggtgtacgggtccagcgacagcgacatggcgtggttggcctcggccagaccgtcgcggaacttaaagttgcgcccctcgatcaggttgcgcatcagctgttccacctcgcgatccaccagctgcttgatgttgttcaccaccgtgtgcagggcctcgcggttgccgataatcgtctccagcctccccagggccgtgggcaccgcctggtccacgtactgcagggcctcgagctcggccatgacgcgctcggtggccgcgcggtacgtctcctgcatgatggtccgggtgttctcggacccgtccgcgcgcttcagggccgagaaggcggcgtagttccccagcacgtcgcagtcgctgtacgcgctgttcatcgttccgaagaccccaatggccccccgggcggcgctcgcgaacttggggtggcgggcccgcagccgcatcagcgtcgtgtgcgcgcaggcgtggcgggtctcgaaggtacacaggttgcagggcacgtcggtctggcccgagtccgcgacgtagcgaaacacgtccatctcctggcgcccgacgatgactccgccgtcgcagcgctccaggtaaaacagcatcttggccagcagggccggagagaacccgcacagcatggccaggtgctcgccggcgaactcctgggttccgccgacgaggggcgccgtggggcgcccctcgtacccgggcaccacgtggccctcgcggtccagctgcgggttggccgccacgtgcgtgccgggcacgagaaagaagcggtaaaaggagggcttgctgtggtccttggggtccgccggcccggcgtcgtccacctcggtcaggtggagggccgaattggtgctgaacaccatggcgcccacgaggcccgcggcgcgcgccaggtacgccccgacggcgccggcgcgggccgcgggcgtttcctggccctcaagcaggggccacgtggtgatgtcggggggcggctcgtcaaagaccgccatcgacacgatggactccagggccagggcggcgtcgcccgccatcaccgaggccaggcgctgctcaaacccgcccgccgggcccttgttcccggcgtcgcgcgcgccccgctggggcttaccctggctggcctcgaaggccgtgaacgtaatgtcggcggggagggccgcgccctcgtggttttcgtcgaacgccaggtgggcggccgcgcgggccacggcgtccacgttccgggcacgcagggccacggcggcgggcccgacgaccgcctcgaacagcaggcgggcgagggggcggttgaaaaacggaagggggtagttgaaattctccccgatcgatcggtggttgcagttaaacggatcggcgatgacccggctaaaatccggcataaacatctgcagcggatacacggggatgcggtgaacctccgcgtccccgatggttaccttgtccatcccgcccagatgcaggaaggtgttgctgatgcacacggcctcccggaagccctccgtgatcaccagatacagcaaggcccggtccgggtccagtccgagccgctcgcacagcgcgtcccccgtcgtctcgtgctttaggtcgcagggccggggcgcgtagtccgcgaagccaaaatgcgggcgcgcccgctcgcagagccgcgtcaggttgggggcctgggtgctgggggccaggtggcggccgccgtgaaagacgtaaacggacgggctgtagtgcgagggcataagcttgagggacaccgcggtccccccaaggcccgtcgtgcgggacccgacgaccgcggccacgttggcctcaaacccgctctccacggtcaggccgacgatgaggggcgcgacggcgacgtccgcgtcgccgctgcgcgccgacagtagcgacagcagctccaggccttcggccggacaggcgcggccatacacgtaccccatcggccccggaggaaccttgacggtggtcgtcgttttgggcttggtgtccatggctttcgggagatcggcgaccggcaggaacgggggcccggcaagacgaccgggggcagacgggggaggccgcgcgtggtcgacggctgctgcccgccgtcgtctctccgatggggtcgaatgccggcgctgggggtggggtctacacccgcccgttcgccgagcggcccctggtgggggtgggatgggtgggatggggtgggcgagaatggcccgccaccggatcgcgccggacgggggggcccggggttgggcaaggtttgggcgcaaggctccagcggcgattcgagaggcctgcggatggcggcccagagctgggtatgctcggccggggcggccggtatatgtacggcgtgctgggaggggcggcgtcgggccccgcccacggtccgccacgccccgcgcgtcatcggcagggggcgtggccgcccttctaaaaaaagtgagaacgcgaagcgttcgcactttgtcctaataatatatatactattaggacaaagtgcgaacgcttcgcgttctcactttttttagaagggcggccacgccccctttgacgtcacgctcacccgggcggccggccgcccataagcgcggcctgccgggccgataaaaagaaaccgcggcgcccccgcggacaccacacactggctctcgaaccccggacgcgcagaagggacccgggcgcgggtccgccggtaagagccggggggaacatcggcaccgccatcccaccccgagctgttgggtgggcgggtgggggggctggtgaggcggtggtgggagggggcggcgtatagcaggacaacgaccggcggcgatgttttgtgccgcgggcggcccggcttcccccggggggaagccggcggctcgggcggcgtctgggttttttgccccccacaacccccggggagccacccagacggcaccgccgccttgccgccggcagaacttctacaacccccacctcgctcagaccggaacgcagccaaaggccctcgggccggctcagcgccatacgtactacagcgagtgcgacgaatttcgatttatcgccccgcgttcgctggacgaggacgcccccgcggagcagcgcaccggggtccacgacggccgcctccggcgcgcccctaaggtgtactgcgggggggacgagcgcgacgtcctccgcgtgggcccggagggcttctggccgcgtcgcttgcgcctgtggggcggtgcggaccatgcccccgaggggttcgaccccaccgtcaccgtcttccacgtgtacgacatcctggagcacgtggaacacgcgtacagcatgcgcgccgcccagctccacgagcgatttatggacgccatcacgcccgccgggaccgtcatcacgcttctgggtctgacccccgaaggccatcgcgtcgccgttcacgtctacggcacgcggcagtacttttacatgaacaaggcggaggtggatcggcacctgcagtgccgtgccccgcgcgatctctgcgagcgcctggcggcggccctgcgcgagtcgccgggggcgtcgttccgcggcatctccgcggaccacttcgaggcggaggtggtggagcgcgccgacgtgtactattacgaaacgcgcccgaccctgtactaccgcgtcttcgtgcgaagcgggcgcgcgctggcctacctgtgcgacaacttttgccccgcgatcaggaagtacgaggggggcgtcgacgccaccacccggtttatcctggacaacccggggtttgtcaccttcggctggtaccgcctcaagcccggccgcgggaacgcgccggcccaaccgcgccccccgacggcgttcggaacctcgagcgacgtcgagtttaactgcacggcggacaacctggccgtcgagggggccatgtgtgacctgccggcctacaagctcatgtgcttcgatatcgaatgcaaggccgggggggaggacgagctggcctttccggtcgcggaacgcccggaagacctcgtcatccagatctcctgtctgctctacgacctgtccaccaccgccctcgagcacatcctcctgttttcgctcggatcctgcgacctccccgagtcccacctcagcgatctcgcctccaggggcctgccggcccccgtcgtcctggagtttgacagcgaattcgagatgctgctggccttcatgaccttcgtcaagcagtacggccccgagttcgtgaccgggtacaacatcatcaacttcgactggcccttcgtcctgaccaagctgacggagatctacaaggtcccgctcgacgggtacgggcgcatgaacggccggggtgtgttccgcgtgtgggacatcggccagagccactttcagaagcgcagcaagatcaaggtgaacgggatggtgaacatcgacatgtacggcatcatcaccgacaaggtcaaactctccagctacaagctgaacgccgtcgccgaggccgtcttgaaggacaagaagaaggatctgagctaccgcgacatccccgcctactacgcctccgggcccgcgcagcgcggggtgatcggcgagtattgtgtgcaggactcgctgctggtcgggcagctgttcttcaagtttctgccgcacctggagctttccgccgtcgcgcgcctggcgggcatcaacatcacccgcaccatctacgacggccagcagatccgcgtcttcacgtgcctcctgcgccttgcgggccagaagggcttcatcctgccggacacccaggggcggtttcggggcctcgacaaggaggcgcccaagcgcccggccgtgcctcggggggaaggggagcggccgggggacgggaacggggacgaggataaggacgacgacgaggacggggacgaggacggggacgagcgcgaggaggtcgcgcgcgagaccgggggccggcacgttgggtaccagggggcccgggtcctcgaccccacctccgggtttcacgtcgaccccgtggtggtgtttgactttgccagcctgtaccccagcatcatccaggcccacaacctgtgcttcagtacgctctccctgcggcccgaggccgtcgcgcacctggaggcggaccgggactacctggagatcgaggtggggggccgacggctgttcttcgtgaaggcccacgtacgcgagagcctgctgagcatcctgctgcgcgactggctggccatgcgaaagcagatccgctcgcggatcccccagagcacccccgaggaggccgtcctcctcgacaagcaacaggccgccatcaaggtggtgtgcaactcggtgtacgggttcaccggggtgcagcacggtcttctgccctgcctgcacgtggccgccaccgtgacgaccatcggccgcgagatgctcctcgcgacgcgcgcgtacgtgcacgcgcgctgggcggagttcgatcagctgctggccgactttccggaggcggccggcatgcgcgcccccggtccgtactccatgcgcatcatctacggggacacggactccattttcgttttgtgccgcggcctcacggccgcgggcctggtggccatgggcgacaagatggcgagccacatctcgcgcgcgctgttcctccccccgatcaagctcgagtgcgaaaaaacgttcaccaagctgctgctcatcgccaagaaaaagtacatcggcgtcatctgcgggggcaagatgctcatcaagggcgtggatctggtgcgcaaaaacaactgcgcgtttatcaaccgcacctccagggccctggtcgacctgctgttttacgacgataccgtatccggagcggccgccgcgttagccgagcgccccgcagaggagtggctggcgcgacccctgcccgagggactgcaggcgttcggggccgtcctcgtagacgcccatcggcgcatcaccgacccggagagggacatccaggactttgtcctcaccgccgaactgagcagacacccgcgcgcgtacaccaacaagcgcctggcccacctgacggtgtattacaagctcatggcccgccgcgcgcaggtcccgtccatcaaggaccggatcccgtacgtgatcgtggcccagacccgcgaggtagaggagacggtcgcgcggctggccgccctccgcgagctagacgccgccgccccaggggacgagcccgcccccccagcggccctgccctccccggccaagcgcccccgggagacgccgtcgcatgccgaccccccgggaggcgcgtccaagccccgcaagctgctggtgtccgagctggcggaggatcccgggtacgccatcgcccggggcgttccgctcaacacggactattacttctcgcacctgctgggggcggcctgcgtgacgttcaaggccctgtttggaaataacgccaagatcaccgagagtctgttaaagaggtttattcccgagacgtggcaccccccggacgacgtggccgcgcggctcagggccgcggggttcgggccggcgggggccggcgctacggcggaggaaactcgtcgaatgttgcatagagcctttgatactctagcatgagccccccgtcgaagctgatgtcccgcatcttgcaataaatgtctgcggccgacacggtcggaatttccgcgtccgctggtttctctgcgttgcgtctgaccacgagcacaaacgtgctctgccacacgtgggcggcgaaccggtagccggggcacgcggtcagcatccgatcgatgagccggtagtgcaggtgggccgacgtgccggggaagatgacgtacagcatgtggcccccgtacgtggggtccgggtaaaaaagaaaccgggggtcgcacgccccccctccgcgcaggatcgtgtgcacgaaaaagagctcgggctggccgagcgtatcggccaggaggtcctggaggggggtgctgtggcggtcggccagcacgaccagggaggccagaaaggtgcggtgctcaaagatcgtattgatctgctgcacgaaggccaggatgagggcctcgcggctgacggtggccagccgcccgtcgcccgcgctgcacgcggggcagcagcccccgatccccaggtagtagcccatgcccgagagggtcaggcagttgtcggccacggtctggtccaggctgaaggggagcgacacgggggtcgtcttcaccaggggcacggagagcgagcgcacgatggcgatctcctcggagggcgtctgggcgagggcggcgaagaagccgcggtagcgacggcgctcgtgcaggcagagctccagcctgcgcgcgtgcgacggcaggctcttgcgggaggcccggcgctccacgccggggttcccggcggcggaaaagcgcgaccgccgccgggtcttgtcgcggccgggcccgggccgggagccggagcgacggggggcgatgtcatacataggtacagagggtgtgctccagggacaggagagagatcgagtgtcgtctgagcagcgcgccggcctcgcggacaaatgtggccagcgcggtgggcttcggcacaaatacctggtacgtcttgaaggtgtagatgagggcccgcagggctatacagacccgcccctcgaactcgttgccgcaggccaacttggccttgtgaagctgcagctcgtcgcgatggtcggcgcgggggtggccaaacaggacccaggggtcgacttccatctccgtgatggcgcacatcggatcgcagaacatgtgcttgaagatggcctcggggcccgcggcccgaagcaggctcacgaaccggcccccgtccccgggctgcgcctcggggtccgcctcgagctggtccacgaccggcactatgcagtcgaagaggctggtgttgttctccgagtagcggacgacggacgccctcaggcgtcgcatggccagccagtaggcccgcaccagcaacagattgcacagcaggcattccccgccggtgcgcccgcgcccccggccgtgcttcagcacggtggccatcagcgggcccaggtccaggtcgggctggggctggggctcggcgaactgcgcaaaacgcggggccgcgtcgcgcatgcgcgccccgcggtgcgcttcccaggactcgctgaccgcggcgcggcgggcgtccgcggcggcgcgcagccggggccccgactcccagacggcgggggtgccggcgagcagcagcaggatcaggtcggcgtacgcccacgtctccggctcacccccctgcgccagcgccccggcggcggcctcgaactccccgttgcgggcggcggcgcgcgtgcagcagctgtctccgcccccgcgcttgccctcggtgcagtcgagcaggcgggcgcagtccttccagttcatcagggcggtggtgagggagggttgcgttcccgagcccccgcccgcccccgcccccgccccgtcatcgcccccggaggccagggtcccgatgagggcccgggttgcggactgcgcgaggaaggaatagttggagtactgcaccttggcggcgcccggggagggcgtcggcctgggttgcttctgggcgtggcgcccgggcaccccgccgtcggtccggaagcagcagtggagaaagaaatgccggtggatgtcgttgatggtcagggcgaagcgcgcgaaggagccgacaagggtcgccttcttggtgcgcaggaagtggtggtccatgacgtagacgaactcgaaggcggccacgaagatgctcgcggcgcagtggggcgcgcccaggcacttggcgcagaggaacgcgtaatcggccacccactggggcgagaggcggtaggcctgcttgtacagctcgatggtgcggcagaccagacaggggcggtccagcgcgaaggtgtcgacggacgccgcggcgaagggccccgtgtccaagagtccctctgccgtggggtctgcgggcgggccgcgggcggaccccggcccccgcccccccgaagcctcgcgcgcggccccgcgcggccgcgggggggcgggcgcgacgtcgctctccacgtcctcgtcgagcgcgctcgcgggcggcacgcctaccacgtgacaggccgccaggagctcggcgcacagggcctcgttaagagccagaaggtcgggatcgaaggccacatacggacgctcgaacgcgccctccttccagctgctgcccggcgactcttcgcgcacggcggcgctcgacggcacccccggggcggacgtcgccatggccggtcgagcggggcgcacgcgtccgcgaacgttacgggacgcgatccccgactgcgcgctgcggtcccagaccctggaaagtctagacgcgcgctacgtctcgcgagacggcgcgggggacgcggccgtctggttcgaggacatgacccccgccgaactagaggttatattcccgaccacggacgccaagctgaactacctctcgcggacgcagcggctggcctccctcctgacgtacgccgggcctataaaagcgcccgacggccccgccgccccacatacgcaggacaccgcgtgcgtgcacggcgagctgctcgcccgaaagcgcgaacggttcgcggcggtcattaaccggttcctggacctgcaccagatcctgcggggctgacgcgcgcttcggcggggcaccggcaccgggaccgacttgttttacataacagtagggggtgggggaacgcgcacccttgcccggtcgcgatggcggggatggggaagccctacggcggccgcccgggggacgcgttcgagggtctcgttcagcgcatcaggctcattgttcccgccacgctgcgcggcgggggtggggagtcgggcccctactcgccatccaacccgccctcgagatgtgccttccagttccacggccaggatgggtccgacgaggccttcccgatcgagtacgtcctgcggctcatgaacgactgggccgatgtgccctgcaacccctacctgcgcgtgcagaacaccggcgtttcggtgctgtttcaggggttttttaaccggccccacggcgccccggggggcgcgatcacggcggagcagaccaacgtgattctgcactccaccgagacgacgggactgtccctcggagacctggacgacgtcaaggggcgcctcggcctggacgcccggccgatgatggccagcatgtggatcagctgctttgtgcgcatgccccgggtgcagctcgcgtttcggttcatgggccccgaggacgccgttcgcacgcggcggatcctgtgtcgcgccgccgagcaggccctcgcccgtcgccgccggtccaggcggtcccaggatgactacggggcggtggtggtggcggcggcgcaccactcttccggagcgcccgggccgggggtcgccgcctcgggcccgccagcgccgcccggacggggaccggcccgtccgtggcatcaggccgtgcagttgttccgggccccgcgtccgggccccccggcgcttctgttgctggcggcggggctgtttctgggggccgctatctggtgggcggttggcgcgcgcctatgaaagggggcgagccaccgtcccgcccgccagtgcatcccagacgcccgcgagccgcacatcccctccgctcccgcctccggcccgattcttacggcgcgacccaaggtcccgatggccgccccgcagtttcaccgccccagcaccattaccgccgacaacgtccgggcgctcggcatgcgcgggctcgtgttggccaccaacaacgctcagttcatcatggataacagctacccgcatccgcacggaacgcagggtgcggtgcgagagtttcttcgcgggcaggccgcggcgctgacggacctcggggtgacccacgccaacaacacgttcgccccgcagcctatgttcgcgggcgacgccgcggccgaatggctgcggccctcgttcggtcttaagcgcacgtattccccctttgtcgttcgcgaccccaagacccccagcaccccgtgagtcctcggcgggtccctccgcggccgtctctcgttgcccccctttcccccttcccgggtggttcaataaaaaacaccaacatacgatattcgcgtttgatacgtttattggggggggtgtagggcccaacgatcggcgattaacaacaccaaacaatcgagcgcgtctaacccagtaacatgcgcacgtgatgtaggctggtcagcacggcgttgctgcgctgaaacagcgccctgcgggtccgctgcagctgttgttgtatgcggcggcatgcgcggatcaaaaccgccagggcgctacgaccggtgcttcgtacgtagcgtcgcgacaagacggcatttgcctgtacgggcaaggggccaaattgcgagtgtggtgactggaggtggtcggcggccaatgggccgggtggttcgtcggcggggggcaagtgcggttccggtgggagggggtcgagcgcctcggtatcatccgagtccgagaaacgcagggagtctgcgtcggagtgttcatcatcggaggagatgtgcagcgtctgaagcagcgatgcgggtgggggcgcggagtcgacgtgaagcgcgagagaggaagcccacgaagtcacagcggacactgggaggtgggtgtttgtatgtgtgggagactcgggcgtcgggaccgagtctcggctctggggtgtaagcgtccgagttacgggcggcaggggcggctggggcaggggcggctggggcaggggcggctggggcaggggcggctggggcaggggcggctggggcaggggcggctggggcaggggcggctggggcaggggcggctggggcaggggcggctggggcaggggcggctggggcaggggcggctggggcaccgagcgcgcgcggatgcgcgtccgcgcggcgggtttggtcgcgggtgactggggtggggggcggcgggcaaccgggcctccgggcacgacccaaccgcacaaaggctcgctcggggcaaccgggcctggggccaaaggcggggggctggtctggacggcggaggtcgggggggcaaggcccggagaaggcggcactgccgccgctgcggcggaaaccgcggccgcgtggtcggctgggtcccggggagaggggagggagttcaacgaggccgagagcgaggcgaccgcggggcgcgtgaggcgccggggtgggccggccgcggggccccgggggggtgtcggcgagggacccgctgttgtctggcggcggccgcggcggcggtcgcccccggggacgaccgctccttcggcgggcggaggcgggatgggcgcgagcgtgggggcgggaaaggccccgcgagccgaggcggggccgggcggaaggggcaaagcagaaacccaagccgggggcgcggactccggggtgggcggctggtcgggaggacgcgcggaagcggcgaccggggcgaccggggcggggagtgccggcggacgccacccctcggggggggcggaggcccggggcgcgcgcgatttggcacgcgtccggcgggacctgcgcacgcgcggcacggcggcggagaaagcggcggcagagccggaaaaggccgggggaggaagcgcggcatccgcggggggactcggtgtgggtggcgagggccgtgggtcgtcgcgaggggccacgggcacgcgccccgtgttttgttgaggcgggacactcggtcgtgtttcgcgagccgtagctgccggcccgatgggccgcggtgcgtactgggacgtggggacggactgatcggtggcgggggggggaagaagggccggggccggattgggcgtggggccgccggcgtcgtcggacgccagctcctccaggccgtggatccaggcccacatgcgaggggggacgggctcgccggtggtggcgtcggtgaggagagtgggggcgaggacccccgggtccgcctgccgtgcggggggggcagcggggtcctcgggacccgatccgccatccccccccgcaaggtcccgcgggtcgcgggcggcggtcggggcagagggacctgcctcgtcggcgagggggcgctggtaaaccgggtgtcccgggaacagctcccccgtcaggagggaggcgtcgaagggccgcccgaggatggcccgcgcgaagaaggggtccgcgtcggcggcgctcgccgcgagaacgtcccccgcggtagccacaaacggaagctcctcggtggcctcgctgcccacaaaccgcacgtcaggggggccggggggctccggggcttcccacaagaccgcgaccggggtcatggagatgtccacgaggaccaggcacgggggcccgtcggcgagagggcgctcggcgatgagcgccgacaggcgcgggagctgcgccgccagacacgcgttttcgatcgggttgagatcggtgtggaggaggccgacggcccacgtctcgatgtcggacgacacgacgtcgcgcagggcggcgtccggcccgccggggcgcgagtcgaagagcgtcaggcacagttccagttccgactcgcgggagaaggccgtggtgttgcggagcgccaccacgacgggcgcgccgaggagcaccgcggccagaaccaggtccatggccgtaacgcgcgcggcgggggtgcggtgggtcgcggcggccagcacggccacgtgctggcccgtgggtcggtagagggcgtggggggcctcggggagggacgcctcgcgcccccccgccgggccgagcgtctggccagactccaggcgtgcggccaggagggcgtcgaagctgtcgtactcggtgtagtcgtcgggaaacatgcaggtccacagcgcggccaaagcggcgctcggcagacacatgcgcccgaggacgctcaccgccgccagggcctgggccggactgagcttcccgagcgccgggacgtcccggcgctgggtcccgagctccaaggccgagcgccagggcgccagcgggtcggtttcggacagcttgccccggcgccagtcggccagccgcgtgccgaacaggaggccccgggtcggggggcctccgtccaaaaacgtcggcaacacgcggatgcgggcgtcgggatgcggggtcaggcgctggacgaacagcatggactccgctgcgtcctcgaacgcgcgttcgagggtgaggtgcatgtactcgtgctggcgaacgaggtccaggcgccagaagttgtagatgtgttccggaacgccggccaccagcgcgaccagcacgtcgttctcgttgaaggcgacgcagtggcgctgggacccccgggggcccggcggcggacgcggcgccgccgctccggacgcccagcccagctgggcccagcgacacccaaactcgcgcgtgagggtggtggcgacgagggcgacgtacagctcggccgccgcgtccatcgaggcgccccacgtcgcctggcgatggcgcacgaagcgaccgaacagctgaaagttggcggcctgggcgtcgctgagggccagctggagccggttcacgacggtcagcacgtacatggccgtgaccgtcggggccgattcgaggacgtccgtcggaagcgggggccgcacgcaggccgcctcgggacgcatcagcagcgcgccgagtttgtcggtgacggccgggaagcatagcgcgtactgcagcggcgttccgtccggggccaaaaagctggtggcgaacggcagatccagagcgctgacggcctcacgcagcaccaggggccccgggtctccgccggcgcgcagatacgcctcgccccggcggcgcagcagctgcgggtcgacctcgtggccctcgggggaagaagaggcccgggcgcgggcgtcgagggcgcgaagatcaacgagcaggggcgcgggcgcggactccgcgcccgcgcccgtctggccgccggccctggcgtacgcgctatataagcccatgcggtattggatgagttcccgcgcgccccggaactcctccaccgcccacggggccaggtccgcggccgccgcgtcgaactccgccagcaggccccccagggcgtcaaagttcatctcccagggcaccctgcgcaccacctcatcccgcagccgggcgcacagggcggtgtgcttggtgacgcgcgcgcccagctcctccacggcctccgcgcgctcggcgcccttggcgcccaggacgccctggtacctggcggaaaggcgctcgtaggccggctgggcccgcagccccgacaccgtgttggtggtgtcctgcagggcgcgcagctgctcgtgcatggcgcggaacccctcgggggacttccaggcgcccccccggacgcggccaaagcgaccccagacctcgtcccactccgcctcggcctcctccagggacctccgcagggcgtcgacgcggcgccgagtatcaaagagcgcccccaggcggccggcgtgccgcgccagggggccggggccgtcgccgcgggcggcgcttagcgggtgcgtctcgaaggtgcgctgggcgtgctctagccagataaccgcgggcacgtcgagctcgcgcgttttctcggtctgatccaacagaacctcgacctggtcggcgatctccgccaccgagcgcgcctggtcgagcgtcttggccacggtcgccgggacggcgaccaccttcagcatggtcttgaggttggccaggccctcggcctcgatctgggcccggcgctcgcgcgcggccagcgcctcccgcaggcccgccatgacccgctcggtggcctccgcgcgctgctgtttggcgcgcaccactgcgtccttggtctcggccgtgtcctgccgggtcacgaaggcgacatactcggcgtacgccgtgttcttcacggggctctggtccacgcgctccaacgccgccgcgcacgcgaccagcgcgtcctcgctgggacacggcagggtgaccccggtccggaccagctccgcggtggcctccgggtcattccgggccgcggatatctgctccgcggcggccgccaggtccaggggcacgccgccgagcgcccggtgcacgtcggcccggatggcgtccaggcgatcgcggagctccacgtagtcggcgtagccatgttggaagaacggcacgtaccggcgcaggccgggcacgctcgtcatgtcgtccgccaggcgccccacggcctcgtggtagtcgataaacccgtcgcccgcctgggccatttccaggagcccctccgcgatgcgcagcagccgcgccaggggctcggcgtcgacccgaaacatgtcggcgtaggtttcggcggcggcgtggaacgccgcgctccagccgaggcggtggatggcggcgagcggggggagcatggggtggcgctggttctcgggggtgtaggggttaaacgcgaaggccgtatccagggcgagggtgaccgcctcggcgttggccgcgagcgcctgctcggcgcgcttgcggaagtcccgggggttgtagccgtgcgtgcccgccagcgcctgcaggcggcgcagctcgaccacgtcgaactcggcgcggttctcgacgcggtccagcgccgcctcgacgccggcggcccagcgctcgctgctgccccgggcgcgctgggccgccatcttcgccgtcaggtcggcgacggcggcctcaagttcgtcggcgcggcgtcgcgtggcgccgatgaccttgcccagctcctgcagggcgcgcccgctgggggaatggtccccggccgtcccttcggcgtgcagcaggcccccgaacccagcctcgtgccccgcgaggctttcccgagcagcggtcgtcgcgcgggccgcggcatcgatgagggcggcatggtccccctccggctgggcgcaggcccggcgcgcctggactaccaggtcggcggccgccgaccccagggtcgtgagctcgtcgatggccccccgcgcctccagggccagccgagtcgcctttacataccccgcggcgctatcggccagcaccgcgaggaaggacaggggcgaggccgggtcgcgggcggccgcgcccagggccgacaccgcgtccgccagggcgccatgcgcccgcacggccgcgtccaccgtcgccgcgggacttgccgtcgcgacggcggcgctcccggcgttgatggcgtttgacacggctttggcgattgtgggggcgtgatcggaaaagaactgcacgaggaccggcgtctcgggggcgtcggcgaacagggtcttcagcaccaccacgaaggcgggatgcaggccggccagagccgtcgcggtatccggggtcgggtgttccagggcctcccggtactgccccagcagcccccacaggtccgcccgcagcgccgccgtgacttccgggggggggccccggacggcatcggccaggtcggtccaccccgcgggcagggaggcccgcagggtcgccagcacggccggacacgcctttagccccacaaagtccgggaggggccgcaggaccccttggagtttgtgcaggaacttctcccgggcgtcgtgggccaccttggcgcgctcccgcgcgtcgttgagcatcgcctccagggcgtgggcgcgctcccgaagccgggagcgcgcctccggagcgagctccgccgtcatcttggccgcctccatggccctcgcctgccgcagcgcgtcttcggccatgcgcgtggcctcgggggacagcccgcccccgtcgacgtacggcgcggggccggtcgccgggacgaaggccgcgtcgctgtccagctgctgcgcgagcgccgcgtcgagggcgtcgaagcgctgcagttcggccagccccgagctgcgccgcgcctgctggtcgttgatgccgtggatgctgcgcgccagctcttccaggggcttgcgttcgatgagcccctgggtcgcggcgtcggtcaggaccgagagccaggccgccaggtcctcgggggcatctaggggctggccccgctggagcaggtcccgcagcaggatggcctgggggctggtggcgagggggggcgggggggggagcgcggcgcgctgagcgacgtcccgcgtgtgttggtcaaaggccggtagcgattccagcaactggaccatgggcacgaccgcggccgaggccacgtgaaaccgacagtcgtggctgtcgctggcctgcagggccttcgcgctgtatacggctccccggtggaagtactccttgaccgcgctctcgatcgcccggcgggcctggatccgcacgtcctccagccgcgcctggatggcctcggggcccagggcgggcgggcacggggccctgccgccggcgcccggggcggcgggcacgggcatcacggtcaggggcccggcgcgctgcgagaccgagtcgaccccgcgggcgagggcgtctaaggcctcgcgcatctcgcgggcctccgcctcgacccgcatctcttcgccccgggcaaactgggccagcgcctggatccgatggagaagcggctccgggtgcgtcggggtggcgggggcgaacagggtgttcgggtgggcgcgcgagcgctccaggagccactctccgaggcgtgcgtacagattggccggcggggcggcgcgcagctgcagatccaggtccgcgaggtccccgtaaaaggcgtccgtctcccgaataacgtccctggcgaccaggaccagcttagcgagggccaggcgcccgatctgcgaattttcgtccagcacgtgctggatgaggggccggtgggcggccacgtccgccaggctcatgcgcgtggacgccaggaagtccccgacggccgttttgcggggcagcatgcgcagggtgaagtccagcagggccgcggccgggccggccaccccggcctgcgtatgcgtgcgggccccgttctcgatcaaaaaggcgaggacgcgctcaaagaagaagatgacgcagagctccaacagccccgggtgcgccgggtacggcgaccgcagggcgttgatggtgagctgcgaacacgcggccacctcgcgggccagggcggcatcgcgcgccgcgagccggaccgccgtggcggccacattggggtggacctcgaacagctgcgccaggtcggcgccggggggctccggggggcggcgggcccccagcgtctcgagcacggacggcgacgacgggctcgcgggcccgtcgtcgccgccgccctgcccggactgcgggggggtatccggtgcgggagggaccgtggcggctatgggcgtcggggaggaggcggggacctcggcggcgacgggggccttcttcttgggcgcggacttcttcttggccttggcgggcggggccttgggggcgggcctctcgcccgaggtcagatcctccacgctggacggtggggtccaggtgggccggcggcgcttgggcaagccggtagaatagcgcgcccggtggcgacccaccggcactgcccccacctccaggacccgcaggtcctcggcttcttcggccgcgtccccggcgggtgtctgcgggggcggggcggcgtgcggtggacccgaggccgcggcgtccggggccgagggcttcgcgggcggggtcccctccagggctgctgcccacacatcatcgggggggcggtttgggtgccccgcctgcggtgtgtcgggtgggcccgaggccccccggggggcctcggggggccggtcggccccaggggtctggacgtgggtgggcgcggggagcgcggggacgaccgggcccgagccttctccgtcccccctggggaccacaccgacaaagagcgccccgagccccccgatctcgccccgcagggggtgggtgatggccacgcgccgctcgacgaacggttcgtcctgcaggtaagtctcgctggccccgtagaggtgcagggccgcggcggtcaggtccgccggcgccacggcccccgggccggagggcacaaaaaacaccatggcgcccgcccaccgcaccttggggcggtcgtgggcgtaatacgtcaggtacgggtacacgtcgcccgcccgcaccttggcgataaacgcgggcgttcccgcgggcaggccgtgcgggtcaaacagataggccgtgtcgccgtcccggtagagccccatgcccagggggccgatggtcaggagcgtgtaggacagcggccgcatggcccaggggccggcgaagaacgtgtgcgcggggcattgcgtctccagcagccccgccgtgggctccccgaagaagcccacctcgccgtacacccgcgaaaacacgcaacgcaggccgccgcgcgccgccgggtactccaggaagttggggagctcgataatggaacacatgcgcggcggcccggagcccgcggccgcgcgcgtccactcgcccccctccaccagacatccctcgatggcctccgcggacagcacgtcgcggggccccacgtcgaaaagaagactgagaaacgacagggacgagcgcatgcacgataccgacccccccggctccagatcggtcgcgaactggttccgaacaccggtgaccacgatatcgcgatccccctggcgcttcatcgtggggtgaggtagcgcggccggaatcatgtgtgccgcgcccgccacgagcggggcctgtttatgggccgggcgtcccgatgagtactgttgtttccgccgcccgaacccccccgcccatcaaccgcctgttcgtccccctaaccacacacccggtatcgcgtgtgtgtggtttcccgggaagacacatcccaccccatgaagttttgccctttttttccgtcccgcactacgccacctttccacccccccccaaaaaaacaacaaccaactcccagatggatgggtgcgataataaagctttattattgtttaaccaaaggcgagtcctacgggtgtaccggtggtgtctcctgcggcgtcatctcgtcgtcctccacgggggtgttgggccaagggaccgtctcgcggcccgccgggcgcgtcgacggcgcgcgggcctgcgtgtcctgtgggccgggtgtcgtgggttcgggggtgctaccgccggcatcttgggcctccaggtccccgggggcccccgggccggcggaaggccgaaacgccgaggcgcgaaacacgccgtcggtgacctgcaggagctcgtttattaatagccagtccatgctcagcgtagcggccagcccctggggagacaggtccacggagtccggaaccaccgtcggctgacccaggggccccaggctgtagtccccccaggcccccaggtcatgacggttcgtgagcacgacgaggtctgcggccgggctggggggcgcgtcctcggtcgcgtgggccatcacctcctgaatggctgcggtgcgctgatcggccgagctggcgaagcgcgccacgaccagcgcgcgctccgtctgcaggcccttccacgtgtcgtggagttcctgaacgaactcggccacccgctcggggcccgtggccgcgcgtgcggcctgatagccggccgagaggcgccgccagcgcgccaggaactgactcatgtaacagaacccggggacctggtcccccgacatcaactttgacgccctggcgtggatgcccgacacgatggccaggaacccgtggatttcccgccgcacgacggccagcacgttaccctcgtgcgagacctgggccgccagctcgtcgcataccccgaggtgcgccgtcgtctcggtgacgacggaccgcagccccgcgagggacgcgaccagcgcgcgcttggcgtcgtgatacatgccgcagtactggctcaccgcgtcgcccatggcctcggggcgccagggccccaggcgctcgtgggcgtctgcgaccacggcgtacaggcggtgcccgtcgctctcgaaccggcactcaaagaaggcggcgagcgtgcgcatgtgcagccgcagcagcacgatcgcgtcctccagctggcggaccagggggtcggcgcgctcggcgagctcctgcagcaccccccgggccgccagggcgtacatgctgatcagcagcaggctgctgcccacctcgggaggctgggggggaggcagctggaccgcgggccgcagctgctcgacggcccccctggcgatcacgtacagctcgcgcagcagctgctcgatgttgtcggccatctgcatcgtgggcccgacgccggcccgggtggccggttcgaggagggtgatcagcgcgcccaattttgtgcggtgcccctcgacggtggggagatagcccaggccgaagtcgcgcgcccaggccagcacccgcagggcaaactcgatggggcggggcaggtaggcagcgttgcacgtggccctcagcgcgtccccgaccaccagggccagcacgtaagggacgaaccccgggtcggcgaggacgttggggtggatgccctccagggccgggaagcggatcttggtggccgcggccaggtgaaccgagggggcgtggctaggcggcccgacggggagcagcgcggacagcggcgtggccggggtggtgggggtcaggtcccagtgggtctggccgtacacgtcgagccagatgagcgccgtctcgcgcaggaggctgggctggccggcgctgaagcggcgctcggccgtctcaaactcccccacgagcgtgcgccgcaggctcgccaggtgttccgtcggcacggccgggcccatgatgcgcgccagcgtctggctgaggacgccgcccgacaggccgaccgcctcacagagccgcccgtgcgtgtgctcgctggcgccctggatccgccggaacgttttcacgtagccggcgtagtgcccgtactcccgcgcgagcccgaacacgttcgcccccgcaagggcaatgcacccaaagagctgctggatctcgctgagcccgtggccggggggcgtccgcgcgggcacccccgccaccaaaaacccctccagggccgatatgtactgggtgcagtgcgcgggcgtgaaccccgcgtcggtaagcgtgttgatcaccacggagggcgagttgctgttctggaccaaagcccacgtctgctgcagcagcgcgaggagccgttgctgggccccggcggagggcggctcccctagctgcagcaggccggtgacggccggacggaagatggccagcgccgacgcactcagaaacggcacgtcggggtcgaagacggccgcgtccgtccgcacgcgcgccatcagcgtccccgggggcgcgcacgccgaccgcgggctgacgcggcttagggcggtcgacacgcgcacctcctcgcgactgcgaaccattttggtggcctcgaggggcgggatcatgatagccgggtcgatctcccgcaccgtgtgctgaaactgggccagcagcggcggcgggaccaccgcgccccgatcgggggtcgtcaggtagtcgtccaccagcgccagcgtaaacagggcccgcgtgaggggggtcagggcggcgtcgtcgatgcgctgtaggtgcgccgagaacagcgtcacccaattgctgaccagggccaagaaccggagaccctcttgcacgatcggggacgggaagagcaggctgtacgccggggtggtcaggttggcgccgggttgccccaggggaaccggggacatcttaagcgacatctccccgagggcctccagggaggtccgcgggttcatggccaggcagctctgggtgacggtccgccagcggtcgatccactccacggcacactggcggacgcgcaccggccccagggccgccgtggtgcgcagcccggcggcctccagcgcgtgggtcgtgtcggagccggtgatcgccaggaccgtgtccttgatgacgtccatctcccggaaggccgcctcgggggtctcggggagcgccaccgccatgcggtgcaccagcagcccggggaggttctcggccaagagcgccgtctccggaagcccgtgggcccggtgcaaggcgcacagttgctccaggagcgggtgccagcacgcccgcgcctccgccgggccgaccgccgcgcccgacaacagaaacgccgccgtggcggcgtgcagtttggccgcggacagaaacgccggctcgtccgcgctgcccgccggctcgctcgagggggagggcggccggcggaggttggtcaggctccccaacaggacctgcaacggtccgtttgggggtggagcggacgggggggtcatgccggcgggcgccgggacctggagcgcgctgtccgacatggcgaccggcgtgcgcgctcggcgacgcggcgcggagaccgcgggcccaaacgggaatgactgccgccgccctatacggaggggctaagtatcgcccggggacccttcgaaaccccgggcgtgtcgcaagtacgccgcgaaggcgcggcgtgttatacggcgcgttatgtcccggcattccgttcgtgggttcgggcccgggtgctgtcgggtgggagtgtgtgtgggggggggcggcgcgacggcggcccggaccaagtgtatcgcggccgttccgtggggcggcccaacaggccctttaaacatttgcgtatgcaccggcccagccagtcggacaccggaacccaccagaggcggaagccgccttcgcccgtgagggtgcgtgtgttttctggtggcgtgtttttcctttccgccctcctccctccccacctccaccacccccccccacaactcgcccgttggcgatcggcgggaaaaccatgaaaaccaagccactcccgacagccccgatggcgtgggccgagagtgccgtggaaaccaccaccagcccgcgcgagctcgcgggccacgccccgctccggcgcgtcctgcgcccgcccatcgctcgccgcgacggcccggtgcttttgggggacagggcccccaggaggacggccagtacgatgtggctgctggggatcgaccccgcggagtcgtctccgggaacgcgcgctacccgagacgataccgagcaggccgtggacaagatcctcaggggagcccggcgcgcgggagggctgaccgtccccggcgccccccgctatcacctgacccgccaggtaaccctgacggatctctgccaaccaaacgcggagccggccggggcgctccttttggccctgcggcaccccaccgacctcccccacctggcccgccatcgggctccgcccggccggcagaccgagcgactggccgaggcctggggccagctcctggaggcctccgccctggggtccgggcgggccgagagcggctgcgcgcgcgcgggccttgtgtcgtttaactttctggtggccgcgtgcgccgccgcctacgatgcgcgcgacgccgccgaggcggtccgggcccacatcacgaccaactacggcgggacgcgggccggggcgcggctggaccggttttccgaatgcctgcgcgccatggtccacacgcacgtgtttccccacgaggtcatgcggtttttcggggggctagtgtcgtgggtcacacaggacgagctggctagcgtcaccgccgtctgcagcggaccccaggaggccacacacaccggccacccgggcaggccccgttcggccgttaccatcccggcctgcgccttcgtggacctggacgccgagctgtgcctggggggcccctggggggcgttcctgtacttggtcttcacctaccgacagtgccgggaccaagagctctgttgcgtgtacgtggtcaagagccagctccccccgcgcggactggaggcggccctcgagcggctgttcgggcgcctccggataaccaacacgattcacggggccgaggacatgacgccccctcccccgaaccgaaacgttgactttccgctcgccgtcccggccgcgagctcgcaatccccgcggtgctcggcgagccaagtcacgaacccccagtttgtcgacaggctgtaccgctggcagccggatctgcgggggcgccctaccgcacgcacctgcacatacgccgccttcgcagagctgggtgtcatgccagacgacagcccccgctgtctgcaccgcaccgagcggtttggggcggtcggcgttccggttgtcatcctggagggcgtggtgtggcgcgcggcggggtggcgggcctgcgcgtgatcgtctattgacgacggccgcccaacccgagcgaccttcccctcccacttccccccccctacacaccaactccgccctcgccgtcttggccgtgcgcggccccgtgcgtccgtctcaataaagccaggttaaatccgtgacgtggtgtgtttggcgtgtgtctctgaaatggcggaaaccgacatgcaaatgggattcatggacatgttacacccccctgactcaggagataggcatatcctccttagattgactcagcacacgatcgcaccccacccctgtgtgccggggataaaagccaacgcgggcggtctgggttaccacaacaggtgggtgcttcggggacttgacggtcgccactctcctgcgagccctcacgtcttcgcccaccgattcctgttgcgttcctgtcggccggtgctgtcctgtcgacagattgttggcgactgcccgggtgattcgtcggccggtgcgtcctttcggtcgtaccgcccaccccgcctcccacgggcccgccgctgtttccgttcatcgcgtctattaattaaagatctcccgatcccctatggtcgactctcagtacaatctgctctgatgccgcatagttaagccagtatctgctccctgcttgtgtgttggaggtcgctgagtagtgcgcgagcaaaatttaagctacaacaaggcaaggcttgaccgacaattgcatgaagaatctgcttagggttaggcgttttgcgctgcttcgcgatgtacgggccagatatacgcgttgacattgattattgactagttattaatagtaatcaattacggggtcattagttcatagcccatatatggagttccgcgttacataacttacggtaaatggcccgcctggctgaccgcccaacgacccccgcccattgacgtcaataatgacgtatgttcccatagtaacgccaatagggactttccattgacgtcaatgggtggactatttacggtaaactgcccacttggcagtacatcaagtgtatcatatgccaagtacgccccctattgacgtcaatgacggtaaatggcccgcctggcattatgcccagtacatgaccttatgggactttcctacttggcagtacatctacgtattagtcatcgctattaccatggtgatgcggttttggcagtacatcaatgggcgtggatagcggtttgactcacggggatttccaagtctccaccccattgacgtcaatgggagtttgttttggcaccaaaatcaacgggactttccaaaatgtcgtaacaactccgccccattgacgcaaatgggcggtaggcgtgtacggtgggaggtctatataagcagagctctctggctaactagagaacccactgcttactggcttatcgaaattaatacgactcactatagggagacccaagctggctagcgtttaaacttaagcttcgaattctgcagtcgacggtaccgcgggcccgggatccaccggtcgccaccatggtgagcaagggcgaggagctgttcaccggggtggtgcccatcctggtcgagctggacggcgacgtaaacggccacaagttcagcgtgtccggcgagggcgagggcgatgccacctacggcaagctgaccctgaagttcatctgcaccaccggcaagctgcccgtgccctggcccaccctcgtgaccaccctgacctacggcgtgcagtgcttcagccgctaccccgaccacatgaagcagcacgacttcttcaagtccgccatgcccgaaggctacgtccaggagcgcaccatcttcttcaaggacgacggcaactacaagacccgcgccgaggtgaagttcgagggcgacaccctggtgaaccgcatcgagctgaagggcatcgacttcaaggaggacggcaacatcctggggcacaagctggagtacaactacaacagccacaacgtctatatcatggccgacaagcagaagaacggcatcaaggtgaacttcaagatccgccacaacatcgaggacggcagcgtgcagctcgccgaccactaccagcagaacacccccatcggcgacggccccgtgctgctgcccgacaaccactacctgagcacccagtccgccctgagcaaagaccccaacgagaagcgcgatcacatggtcctgctggagttcgtgaccgccgccgggatcactctcggcatggacgagctgtacaagagcggccgcttaattaaccacacgccctatcatctgagggagtatgcgacgcggctggttaacgggttcaaacccctggtgcggcggtccgcccgcctgtatcgcatcctgggggttctggtccacctgcgcatccgtacccgggaggcctcctttgaggaatggatgcgctccaaggaggtggacctggacttcgggctgacggaaaggcttcgcgaacacgaggcccagctaatgatcctggcccaggccctgaacccctacgactgtctgatccacagcaccccgaacacgctcgtcgagcgggggctgcagtcggcgctgaagtacgaagagttttacctcaagcgcttcggcgggcactacatggagtccgtcttccagatgtacacccgcatcgccgggtttctggcgtgccgggcgacccgcggcatgcgccacatcgccctggggcgacaggggtcgtggtgggaaatgttcaagttctttttccaccgcctctacgaccaccagatcgtgccgtccacccccgccatgctgaacctcggaacccgcaactactacacgtccagctgctacctggtaaacccccaggccaccactaaccaggccaccctccgggccatcaccggcaacgtgagcgccatcctcgcccgcaacgggggcatcgggctgtgcatgcaggcgttcaacgacgccagccccggcaccgccagcatcatgccggccctgaaggtcctcgactccctggtggcggcgcacaacaaacagagcacgcgccccaccggggcgtgcgtgtacctggaaccctggcacagcgacgttcgggccgtgctcagaatgaagggcgtcctcgccggcgaggaggcccagcgctgcgacaacatcttcagcgccctctggatgccggacctgttcttcaagcgcctgatccgccacctcgacggcgagaaaaacgtcacctggtccctgttcgaccgggacaccagcatgtcgctcgccgactttcacggcgaggagttcgagaagctgtacgagcacctcgaggccatggggttcggcgaaacgatccccatccaggacctggcgtacgccatcgtgcgcagcgcggccaccaccggaagccccttcatcatgtttaaggacgcggtaaaccgccactacatctacgacacgcaaggggcggccatcgccggctccaacctctgcaccgagatcgtccacccggcctccaagcgatccagtggggtctgcaacctgggaagcgtgaatctggcccgatgcgtctccaggcagacgtttgactttgggcggctccgcgacgccgtgcaggcgtgcgtgctgatggtgaacatcatgatcgacagcacgctacaacccacgccccagtgcacccgcggcaacgacaacctgcggtccatgggcattggcatgcagggcctgcacacggcgtgcctcaagatgggcctggatctggagtcggccgagttccgggacctgaacacacacatcgccgaggtgatgctgctcgcggccatgaagaccagtaacgcgctgtgcgttcgcggggcgcgtcccttcagccactttaagcgcagcatgtaccgggccggccgctttcactgggagcgcttttcgaacgccagcccgcggtacgagggcgagtgggagatgctacgccagagcatgatgaaacacggcctgcgcaacagccagttcatcgcgctcatgcccaccgccgcctcggcccagatctcggacgtcagcgagggctttgcccccctgttcaccaacctgttcagcaaggtgaccagggacggcgagacgctgcgccccaacacgctcttgctgaaggaactcgagcgcacgttcggcgggaagcggctcctggacgcgatggacgggctcgaggccaagcagtggtctgtggcccaggccctgccttgcctggaccccgcccaccccctccggcggttcaagacggccttcgactacgaccaggaactgctgatcgacctgtgtgcagaccgcgccccctatgttgatcacagccaatccatgactctgtatgtcacagagaaggcggacgggacgctccccgcctccaccctggtccgccttctcgtccacgcatataagcgcggcctgaagacggggatgtactactgcaaggttcgcaaggcgaccaacagcggggtgttcgccggcgacgacaacatcgtctgcacaagctgcgcgctgtaagcaacagcgctccgatcggggtcaggcgtcgctctcggtcccgcatatcgccatggatcccgccgtctcccccgcgagcaccgaccccctagatacccacgcgtcgggggccggggcggccccgattccggtgtgccccacccccgagcggtacttctacacctcccagtgccccgacatcaaccaccttcgctccctcagcatcctgaaccgctggctggagaccgagctcgtgttcgtgggggacgaggaggacgtctccaagctctccgagggcgagctcggcttctaccgctttctgtttgccttcctgtcggccgcggacgacctggtgacggaaaacctgggcggcctctccggcctcttcgaacagaaggacattcttcactactacgtggagcaggaatgcatcgaggtcgtccactcgcgcgtctacaacatcatccagctggtgctctttcacaacaacgaccaggcgcgccgcgcctatgtggcccgcaccatcaaccacccggccattcgcgtcaaggtggactggctggaggcgcgggtgcgggaatgcgactcgatcccggagaagttcatcctcatgatcctcatcgagggcgtcttttttgccgcctcgttcgccgccatcgcgtacctgcgcaccaacaacctcctgcgggtcacctgccagtcgaacgacctcatcagccgcgacgaggccgtgcatacgacagcctcgtgctacatctacaacaactacctcgggggccacgccaagcccgaggcggcgcgcgtgtaccggctgtttcgggaggcggtggatatcgagatcgggttcatccgatcccaggccccgacggacagctctatcctgagtccgggggccctggcggccatcgagaactacgtgcgattcagcgcggatcgcctgctgggcctgatccatatgcagcccctgtattccgcccccgcccccgacgccagctttcccctcagcctcatgtccaccgacaaacacaccaacttcttcgagtgccgcagcacctcgtacgccggggccgtcgtcaacgatctgtgagggtctgggcgcccttgtagcgatgtctaaccgaaataaaggggtcgaaacggactgttgggtctccggtgtgattattacgcaggggaggggggtggcggctggggaaagggaaggaacgcccgaaaccagagaaaaggaccaaaagggaaacgcgtccaaccgataaatcaagcgccgaccagaaccccgagatgcataataacgattttattactcttattattaacaggtcgggcatcgggaggggatgggggcgcgcgtttcctccgttccggctactcgtcccagaatttagccaggacgtccttgtaaaacgcgggcgggggcgcgtgggcccacagctgcgccagaaaccggtcggcgatgtccggggcggtgatatgccgagtcacgatggagcgcgctaaatcttcgtcgcggaggtcctgatagatgggcagtctttttagaagagtccagggtccccgctccttggggctgataagcgatatgacgtacttgacgtatctgtgctccaccagctcggcgatggtcatcggatcgggcagccagtccagggcctccggggcgtcgtggatgacgtggcggcgacgtccggcgacatagccgcggtgttccgcgacccgctgcgcgttggggacctgcacgagctcgggcggggtgagtatctccgaggaggacgaccgggcgccgtcgcgcggcccaccggcgacgtccgggggctggaggggggggtcttcttcgtagtcgtcctcgcccgcgatctgttgggccagaatttcggtccacgagatgcgcgtctcgaggccgaccggggccgcggtcagcgtaggcatgctctccagggagcgcgagttggcgcgctcccgccgggccgcccggcgggcctgggatcggctcggggcggtccagtgacactcgcgcagcacgtcctcgacggacgcgtaggtgttattggggtgcaggtctgtgtggcagcggacgaacagcgccaggaactgcgggtaactcatcttgaagtactgcagcaggtcgcggcagtgaatcgtcggaatgtagccggtgctgatgtccaacacgatatcgcagcccatcagcaggagatcggtatccgtggtatgcacgtacgcgaccgtgttggtatgatagaggttcgcgcaggcgtcgtcggcctccagctgacccgagttgatgtaggcgtaccccagcgcccgcagaacgcggatacagaacaggtgagccaggcgcagggccggcttcgagggcgcgcccgagggggccgccgggcctgggccggcggcccgcgttccccggtcccccggggcgaaggcgtgcccgcggcggcgcatgttggaaaaggcgaaactgggcctggagtcggtgatgggggaaggcggcggcgaggcgtctacgtcactggcctcctcgtccgtgcggcactgggccgtcgtgcgggccaggatcgccttggccccgaacacaaccggctcggtacactcgaccccgcgatcggtcacgaagatggggaacagggacttttgggtaaacacccgtaacatactacagagacagtgtagcgtgattgcctcgcggtcgtaacttgggtagcggcgctgatatttaaccaccagggtatacatgacattccacaggtccacggcgatgggggtaaagtagccctccggggcccggaggccccggcgcttcaccagatggtgagtctgggcaaacttcatcatgccaaacagacccattccggcacgattgtaggtgcggataggtctctctacagagctgtataggtgtgacggtccgggacacccaagcccgccgcccctgtgtacagtggctgcggcgacgaccccgctccaacaagacgctatcccgggaaaggcacgctctttataattcttttttatttcccatctacgtgcggattggtgcaaccgccggcgcgcgccggtgcaggccgaccatctctctcttccccccctccccctcccccgagccctcaaagagggtgtggcctaactagcggaaggcgtatttaaccagactagggcggcgggtccgccgtagtccttggctcgggtagccactgctctgtggctcgggtcccccggcccccctaacccccatccggtccgcgtcatccgccccctccgcctgcgacacaaacggccgcgcctccgggcccggtgacacgacgcgcctcgtctctgcggattgtcccgggagcgtcgcggcatggctcatcttcccggcggtgcggccgccgcccccctttcggaggacgcgatcccgtcgccgcgcgagcggacggaagactggccgccctgccagatagtgctgcagggcgccgagctgaacgggatcctgcaggcctttgcgccgcttcgcacgagccttttggactcgctcctggtcgtgggcgaccgaggcatccttgtacataacgcgattttcggcgagcaggtgtttctgcccctcgaccattcgcagttcagtcgctatcgatggggcggacccaccgcggcgttcctgtctctcgtggaccagaagcgatccctgctgagcgtgtttcgcgccaaccagtaccctgacctgcggcgggtggagctgacggtcacgggccaggccccgtttcgcacgctggtgcagcgcatatggacgaccgcgtccgacggagaggccgtggagcttgccagcgagacgctcatgaaacgcgagttgacgagcttcgcggtactactcccccagggcgaccccgacgtccagctgcgcctcacgaagccccagctcacgaaggtggtgaacgccgtcggggacgagaccgccaaacccaccacgttcgagctcggccccaacggcaagttttccgtgtttaacgcgcgcacctgcgtcacctttgccgcccgcgaggagggcgcgtcgtccagcaccagcgcccaggtccagattctgaccagcgcgctgaagaaggcgggccaagcggccgccaacgccaagacggtctacggggaaaacacacaccgcacattctcggtggtcgtcgacgactgcagcatgcgggcggtcctccggcggctccaggtcggcggggggaccctcaagttcttcctcacggccgacgtccccagcgtgtgtgtcaccgccaccggccccaacgcggtgtcggcggtgtttcttttaaaaccccagcgggtctgcctgaactggctcggccggagcccgggttcctcgaccgggagcttggcgtcccaggactctcgggccggcccgaccgacagccaggactcctcctccgagccggacgcgggcgaccgcggcgccccagaagaagaaggcctcgagggccaggcccgggtaccgcccgcgttcccggaaccgccgggaaccaagcggaggcaccccggggccgaagttgtccccgcggacgacgccaccaagcgcccgaagacgggcgtgcccgccgcccccacgcgagccgagtcgccccccctctccgcgagatacggacccgaggcggcggagggtggtggggacggcggccgctacgcgtgctactttcgcgacctccagaccggcgacgcgagccccagccccctctccgccttccggggtccccaaagacccccatacggctttgggttgccctgacggcaacgggtggtggccgaacgcctcaccgcgcccgggcacgcggggtgcgttgtgttaaaaaaataaataaatggggtagtgtgtcccccccccctccaaccaatatggctgtcgtgtgtggttccgggttgcgcctccgtcctttccaccccccttccccctccttttttgttttgcgtgcgcttataagagcgggcccggggcccttcgcagcttcaccgagagcgccgtcgggccccgggtgcgggatgtgtcgcggggacagccccggggtcgcgggcgggagcggcgaacactgcctcggaggggatgatggggacgacgggcgcccccgcctcgcctgcgtgggtgccatcgctcgggggttcgcgcatctctggctccaggccgccacgctgggcttcgtggggtctgtcgttctgtcgcgcggcccgtatgcggacgccatgtcgggggcgttcgtgatcgggagcaccggcctggggttcctccgcgccccccccgcgttcgcccggccgccgacgcgtgtgtgcgcgtggctgaggctggtcggcgggggagcggccgtggccctgtggagcctcggggaggccggcgcgcctccgggggttccgggcccggcgacccagtgcctggcgctcggggccgcctacgcggcgctgctggtgctggccgacgacgtccatccccttttcctcctcgccccgcggcccctgtttgtcggcaccctgggggttgtcgtcggcgggctgacgataggcggcagtgcgcgctactggtggatcgacccccgcgccgccgcggccctgacggcggcggtggtggcgggcctcgggacaaccgccgccggggacagcttttccaaggcctgtccccgccaccgccgcttttgcgtcgtctccgcggtcgagtctcccccgccccgatacgccccggaggacgccgagcggccaacagaccacggacccctgttaccgtcgacgcaccaccagcgatctccgcgggtctgcggcgacggggccgcacggcccgaaaacatctgggttcccgtggtgacctttgcgggcgcgctcgcgctggccgcctgcgccgcgcgagggtctgacgcggctccgtcaggcccggtcctgccgctgtggccccaggtgtttgtcgggggccacgcggcggcgggcctgacggagctgtgtcagaccctcgcgccccgggacctcacggacccgctgctgtttgcgtacgtcggattccaggtcgtgaaccacgggctgatgtttgtggtccccgacatcgccgtatacgcgatgctggggggcgccgtgtggatctcgctgacgcaggtgcttgggctccggcgccgccttcacaaggacccagacgccgggccctgggcggccgcgaccctgcggggcctctttttctccgtctacgcattggggtttgcggcgggggtgctggtgcggccgcggatggcggcgagccggcggtcggggtgatcgccatttcaaataaaaggcacgagttccccgaataccaccggcgtgtgatgatttcgccctaccgctccgatccccggggggaggggggaaggaaatgggggcgggggtgccgtggacgggtataaaggccaggggggcaggcgggcccatcactgttagggtgttaggttgggaggtggcacaaaaagcgacactcccgtgttgtagttgtccgcgggaggcggtggtttccggcaaccctcctcgctgcgccgggcgcgcccaccggtccttcgcgggggccggggctcttctggtcatggcccttggacgggtgggcctagccgtgggcctgtggggcctgctgtgggtgggtgtggtcgtggtgctggccaatgcctcccccggacgcacgataacggtgggcccgcgggggaacgcgagcaatgccgccccctccgcgtccccgcggaacgcatccgccccccgaaccacacccacgcccccccaaccccgcaaggcgacgaaaagtaaggcctccaccgccaaaccggccccgccccccaagaccgggcccccgaagacatcctcggagcccgtgcgatgcaaccgccacgacccgctggcccggtacggctcgcgggtgcaaatccgatgccggtttcccaactccacccgcacggagttccgcctccagatctggcgttatgccacggcgacggacgccgagatcggaacggcgcctagcttagaggaggtgatggtaaacgtgtcggccccgcccgggggccaactggtgtatgacagcgcccccaaccgaacggacccgcacgtgatctgggcggagggcgccggcccgggcgccagcccgcggctgtactcggtcgtcgggccgctgggtcggcagcggctcatcatcgaagagctgaccctggagacccagggcatgtactactgggtgtggggccggacggaccgcccgtccgcgtacgggacctgggtgcgcgttcgcgtgttccgccctccgtcgctgaccatccacccccacgcggtgctggagggccagccgtttaaggcgacgtgcacggccgccacctactacccgggcaaccgcgcggagttcgtctggttcgaggacggtcgccgggtgttcgatccggcccagatacacacgcagacgcaggagaaccccgacggcttttccaccgtctccaccgtgacctccgcggccgtcggcggccagggccccccgcgcaccttcacctgccagctgacgtggcaccgcgactccgtgtcgttctctcggcgcaacgccagcggcacggcatcggtgctgccgcggccaaccatcaccatggagtttacgggcgaccatgcggtctgcacggccggctgtgtgcccgagggggtgacgtttgcctggttcctgggggacgactcctcgccggcggagaaggtggccgtcgcgtcccagacatcgtgcgggcgccccggcaccgccacgatccgctccaccctgccggtctcgtacgagcagaccgagtacatctgccggctggcgggatacccggacggaattccggtcctagagcaccacggcagccaccagcccccgccgcgggaccccaccgagcggcaggtgatccgggcggtggagggggcggggatcggagtggctgtccttgtcgcggtggttctggccgggaccgcggtagtgtacctcacccacgcctcctcggtgcgctatcgtcggctgcggtaactccggggccgggcccggccgccggttgtcttcttttccaccccttccgtcccccgtacccaccacaccccaccccacccccccgccgtcccccgggcgttataagccgccgcactcgcttttcccaccggaaaatcctcggcccgatccgaacggcgcacgccgcgtgggctccaaacgcctccggaagagagcgccccgccccgatattcaagcccgcggtggtgctatggctttccgtgcttcgggacccgcctaccagcccctcgcccccgcggcctccccggcgcgggctcgtgttccggccgtggcctggatcggcgtcggagcgatcgtcggggcctttgcgctcgtcgccgcgttggttctcgtaccccctcggtcctcgtggggactctcgccgtgcgacagcggctggcaggaattcaacgcgggatgcgtcgcgtgggaccccacccccgtcgagcacgagcaggcggtcggcggctgcagcgcgccggccacccttatcccccgtgcggccgccaagcacctggccgctctgacacgcgtccaggcggagagatcgtcgggttactggtgggtgaacggagacggcatccggacctgtctgagactcgtcgacagcgtcagtggcatcgacgagtttttcgaggagctcgcgatccgcatatgctactacccacgaagccccggcgggtttgtccgcttcgtaacttcgatacgtaacgccctggggttgccgtgaggcgcgcgtccgacggtcccgcttctcgcctctcttcttcccccaccccacccaccgaccaacgacggcgtttggccaataccctccttttttctttttctcttcccccccccccaaaaaaaacaataaacagctaattgcgtacgacaaaccatgcggaactcgctgttttttttctctgtttgttactttttattgaaacagacatacggggaaaggggccggaaaccgagacggtggggccggcggtcgcatttttttaatggctctggtgtcggccgcgtttgagcttcgtcaacagggcgctgagggcggcgacgttcgtcgggccgtcgttggccagcgcgttggtccgggggcgggcgggcatgggcgacaggcttagtcccgggtccggggcgcgtgtggcccgccgaggggagaagagggcagacccgccccagtcgtacaggggattttccgcctcgatgtacggggagtccggggcgtctcccggcagggcggccccgccggcaagacgccggcgagggcagatgttttcgtatacccgaacccaggggatctcctcgtagacgcgccccccatcctcgcccaccgactcgtaaatggaatctgcgtcctcggagggggcgcggggggcgtggctttcggccggccaggcggcggcggcggtggtgtcggcggcgggggtggcgccaagcccgacgcccgcgggcatggcggcgtcatcgtcgggcagcagatacgtgttttccatctggtccggttcggcctccgcgtccggcccccaggtccgcaccgcgtcgtagaccccggcggcctcgcgctgagccgcgagcgggcgcgccgcggctgccggccgctgctcggggggcgcggggttgcggggcgggaggcgcgggggcgccccggccatatgcgtgtaatacgtggccggccggccggcgcagggctcgggaccccggtcggccgcgtcgacgtgcgggggctcggggaggtcctcgcggtggcgcctgcacctccgaggggccgcgggggtcgagtgggggcgagcccgggggagcggcgggggtgcgttgtcgcgccgggtccgttgtatcttgtcccggcagctcccgccgaccgcgccgcggccccccggtgggccggacgccgcgaggcgcaggatggactcgtagtggggcgacggggttccgctccgaagcaggtccggggccagggcggccccgaaccaggacttgatgctgagttccatccgggcccagctcggggcggtcatcgtggggaacaggggggcggcggtcctgcagaagcgctcctggctgtccaccgccgccgtaaggtactcgttgttcaggctgtcggaggcccagacgacatacccggtaagcgtcgcgttaattatatactgggcgtggtggtggactatggatagaacctcgacggtcgagacgatggcgtccacgatcccgtacgtgccgccgctgcgcttgccggtctcccacaggtgggccaggcgcgtcaggtggcccaggacgtcgctgaccgccgcccgcagggccatgcactgcatcgagcccgtggtgccgctgggcccgcggtccaggtggcgcgcaaacgtctccgcgggcgcctccagactcccgctgagcgccacgaaccggcgatcggcggggcccaggcggcgacacacgtacttgtccgccgtccacagcatccacgaggcccaatggtacaacacggagacgtaggccaggagctcgctcagccgcagtgcggtgtccgtgctcggccggctcgggtctgcggggcgcataaagaacatgtactgctggagcctgtgggccgcgtcgcgcaaccccgccaccgcggcggcgtacttggccgcggcggccccgctcttgaacggggcgcgcaccagcagcttcgggagcagggtgggccgcagcagcacgtgcaggctggggtcgcagtcgcccgccgggtcgtcggggatgtccaggccgctgggcacgaccgtctggaggtacttccagtactgcgctaggatggcgcggctcagctggccgcccgacagctccacctcgccgagcgcctgcttggcggccgacgcgtagtgccggatgtagtcgtagtgcgggtcgctggcgagcccgtctacgatcaggctctcggggacggtgttatggtgccgcgccgccagccggacgctgcgatcggcgccggtcagaaacgccggctgcaggtcgtcggcgcgctgccgcaggacgcccacggccgcgctgaggagcccctccggggtggggagcagacacccggcgaagatgcgccgctcggggacgcccgcgttggcgccgcggatgaggttggccggcgtcaggcaccgcgccagccgcagggagctcgcgccgcgcgcccggcgttgcatggcggagaccgttcggtcgggggccccgccggtcggaggtatgccgcgtcccgggatatagggttgctttttatggggaggcgcctatgggcgtggcgggccgcccagcccggtcgcgcgcctcccggacacgtgcgcccggagggcggcggtctcctcgtcgcccatgagcagtttccgaaactgcgccatgatgtccacgacgcggacccgcggccccagcacggactcgctattcaggggggcgggggggaaggccgccaggtcttcgagcaggaaggcggggtctgccgtcccgctcacgggcgcccggggcgccgaggacgcggggcgaaggtccacgtgttccgcggcggcgcgcacgtccgcccaaaatttggcgggggtggtccgcgcgtacaggggctgggtcgcgcggaggacgcacgcgtagcgcaggggggtgtacgtgcccacctcgggggccgtcgacccgccgtcaaacgcggccagggccacgcacgcgaccaccgtgtcggccaggcccagcagccgctgcaggatgagccccgtcgccagcacggcgcgcgcggccgccgcgtcgtccctgcgccggcgcgcgtccccgcaggccagggcgtatttcagggtaacggtcgccagggccgtgtgcagcgcgtacacggccgcgcccagcacggcgttcagcccgctggtggcgagcaggcggcgcgccgcggtgtcgcccagcgcctcgtgctcggccgccacgaccccggggctgcccaggggcagggcgcgaaacagcgcctcctgctccacgtccgcaaacgcggggtgggcggagtgcgggtgcaggcgcgcccccacgaccaccgagagccactggaccgtctgctccgccaggaccgccagcacgtccaggacgcgccccgcaaacgcggcctcccgcgggagcacgcatttgacggcgccggggttgaagcgggcgagcagagccccggtggcgatgtacgtcatgcgccccgcgtagcgggcggccacgcgacagtcgcgccccaggagcgcgcgcaccccgggccagtacagcagggaccccagcgaactgcgaaagaccgcggcgtcggggccggggtgggggggcgcggcccctcccgcgctgagcagcggcacggcggcggcccccacgggccgcaacgccgtgaggctcgcgaactgccgtcggagctcggccgccctgtcgtcgagctccgagccgcgcccctccgtgtgcaggcgcgtcccgcagacccacccgttgatcgccacccgcacgatggcgtccaccagaaaacccatcgcgcgggaggggctggtttttgcccgccgatccgtcaggtcgaggatcgcgtcgcccgtgacgtaccaggccagcgcctcgccctgctgcagcgtctggcggaaaaacacctttgggtcggccggggaggcaaagtgcatgacccccacgcgcgacagcccgaacgcgctatccggacacgggtagaacccggccggatgtcccagggccagggccgagcgcacggactcgtcccacgcggcgactcggggggtcaggcggtccagggggaatgccgcctgcagctccgggcccgacacgcggcccgcgagaatctcgaccgtcgcggaaggccgcgccccggggccgtcatcgtgcgcgacggcggcggggtagtcgtcctcctcgtagttgagctcgtccaggaacagcggcgagggcaccacccgcgaaccgcccacccgccccaaaacgtcgcgtgggtccatcgggcccaggtagcctccccgcggggcccgcgtgatggcgctgtcccggcgtccgcgaacggactggctcctggccgtaacggacctggggcgcggaaaggacgcccggcgggggggcgccgccgcccgggcctcggacgcgcgtcgggacccggggtgaccgcgggcctcccggcgacggcgcgggggcggctcttcgctcgccatctcccccgcggcctcgacctcgctgtcgtcgtccacgttaaacaccgcccgcaggtaccccattaacccgactccaccgccctcgggctcgtcctccacgggcgagtcggcgcgatgcgcggacggggcatgggaccgggtggaggcgcgcctccggcgtacggcatgcccgcgcacggacatggtggccggaggcccgattttttacacacgccctccccgcagacggacgaggaaaggggtggtgcgaggggggaggcccaaacggggaggtggggggtagggggcggtcccagggagcggggggtaggaaccggcacgacgggaacagagaaaacgcgaccgctccaacaagggtgggggggtgggcctcgtccccacgcagacccgcgggcaaatgcgagaacgggacccgcgcgcctgcctttatacgcggaccccagcaccacgagccgttctgtgacgcgaatctacacgaccgcgggctcgtaggcgcgactaacgcccaacccaacggcacacaccccccaccccgcgcgtaaccccatttctttcatggtcccgtaataaacagccaacgcacgccgcgtatgatgagttgcttgccaatgtttattgctgtggttgcgaaccctctatcgcgatacagacggaggtgaggcggggcggtggtggggggggggcgcgccgcccggtcgcacatcctaccccccaaagtcgtcaatgcccatggcatcggtaaacatctgttcaaactcaaaatcgtccacgtccaaagccccatacgagacggggtcgtgggtcattcccggggagggggactccacgtcccccagcatctccaagtcgaagtcgtccagggcgtcggcgggcgtcatatccacctcctcgccgtccaggcggagttcgtctcccaggctgacgtcggtaatgggggcggtggtggacagtctgcgggggcgttgtcccgcggagagaaacgacatgcgcggcgccaccagcccggcctccgcaggagcgtcatcgtcgtccgggaggtcgagcaggccctcgattgtcgatccgtaattgtttctggtccgcccgcggctatacgcgtgctcccgcatgacggactcgccctccgaggtcgcgacgctggagtacgagtccaacttggcccggatcagcagcataaagtacccagaggagcgggcctggttgccctgcaggacgggcggggtcgtgaggggcgccccgggttcctccgccgccgcacttcgcaccagcgggaggttcaggtgctcgcgaatgtggtttagctcccgcagtcgccgggcctccacgggaactccccgcacggtgagcgatccgttgataaacatcaggggctgaaacagacacgccaactggcgccagctctccaggtcgcagcagaggccgtcgaacagatcgggccgcatcatctgctcggcgtacgcggcccataggatctcgcggctcagaaagaggtatagatgcagaaacaggacgcgcgccaggcgcgcggtctcgcggtagtacctgtccgcgatcgtggtgcgcagcatctcccgcaggtcgcggttgcggccccgcatgtgtgcctggcggtgtagctgccgaacgctggcgcgcaggtaccggtacagggccgagcaaaaatttgccaacacggtccggtagctctcctcccgcgcccgcagctcaccgcggaaaaactgcgccatggcctcgtagtacgaaggcagctcgtcgcgggtggcgggcagggtggggaacgccacgtcgccgtgggcgcgaatgtcgatcggggagcgctcggggacgtgcgcatccccccagtcgatcacgtcgctgggcagcgtcgacagaaacttgcactcccggtacatgtcggcgttggtcgggaacccagagaacaggtcctcgttccaggtatctagcatggtacacagcgcgggacccgcgctgaagcccagatcgtcgaggagacggttaaacagggccgcgggggggacgggcatgggcggcgagggcatcagctgggcctgactcagccgaccggtggcgtacagcggaggggcggctggggtgttcttgggacccccggctggcctggggggcggtggcgaaaccccgtccgcgtccgcaaacagatcgtcgaccaacaggtccatgggggcggttgggtccgggaataacgatctcgagaggcgaatgagacgtgcccgagcgcccggcggcggagagggggggagggatccgggacccgcgacagaaaaaggccggggccctcgcgaagggaatcgccgggggtgccgtgcgtccccgaggactgacatctcgcgtccaccaccccgcatttaagtatcaccccagtgccgccccaaacctcgtgacttccccaccgctccgggcggcccgtcccccgcgctcggaagggaggcgtgtccttcctcccgcccctcccgcccctcccgcccctcccgcccctcccgcccctcccgcccctcccgcccctcccgcccctcccgcccctcccgcccctcccgcccctcccgcccctcccgcccctcgccacaaacgcgtgctgacagcgaagtggttaaatcgaccgtgatgctttattgtctgtcgtctgaacgcggtcggggtcgctactcgagggggcggcggggacgggaagccgagcgggcgggggcccgtgcggtcgcggcggcacgccccgcggggcggccccgggcggccgcggtcgcgtcgacgtcctgcgccgcgtcgggattcaccaactcgttcgcgcgctgcaggaggttcttgccctcgcagaccgtcacgcgaatggtggtgaggtcgaggagctcgttgaggtcttcgtcggtgtgcggccgcgacatgtcccacagctgtaccgccgccagccgggcgtgcgtggccgccaggcgcccgaccgcggcgcagaagacgcgcttgttgaacccggccacccggggggtccacggcgccgtggggctcggtggggcggtgctgaagtgcagcttcttggccagtccctgggcgggtgtcttggttcttcccgaggccgtgggagcgggggcgtctaggagcacggcggagtcggcctgggcgggtcgcctgccgcgggcggggtcggtcgccggggtcgcggaggccttaggcgccccgcgcgtcattttgggggtccgcgcgggaggggcgtgcgagcgcccgccggcgcccacggggcccccggggggtggaggagcgcgcgcggggccggggccgtgagagcccgcgacggacgccgaacgacgcggtcgcgcggtatcccgggactcgtcgtcgtccgaagacgagtcccggtagagggcatacccagcctcgtcataatggagaaagcgaacctcgcccctcgggcgcgcgcgcatcgggccagcgccgcggcggaagtcgtcgcgcggactctctgggtccgccggggagaccgggccatagtacagctcctcgtgggtcccgcgcggcgcttcccgcggacacgacttgacggagcggcgagaggtcatggtctatcggagacaccggggacgcccgtgcggatcacagggaaggcgtcggcgaaggaggcagagagcgtcggaaggcggcgagggagggaaagagggagaccggcggggtacgggagagcagcgagggcctgcgtaacccacgggggccgcgggagtggctccctgcgggttgcgggggagagtttataggaagtggatataaccgcaggcgacgggactaaccaatccccgggggggcaacggacagacacgccccgaacaggcccgacttccgcgaggaagcaaaggccgggggccgcccaacgacacgcccaccccttcccaacagggcgggctcaggctgacccggcggccagtgcccgctgacatatctgatacacgtgcgcgatcatacatacgcccatcgaggtcatgcctagataaaagggcaccaggacccccgggacggacaccacaccggcgctgtcgccccggcattgcgcgtccccgataacgccgcgtgcgcctgccgcgttcggcggctccccgggcacgcccgcgacgagcgcgacgaacaacagcaccacccagcggcccagtcttgcgggtttccccgtcatcgcggcgatgagtcagtgggggcccagggcgatccttgtccagacggacagcaccaaccggaatgccgatggggactggcaagcggccgtagctattcgcgggggcggagtcgttcaactgaacatggtcaacaaacgcgccgtggattttaccccggcagaatgcggggactccgaatgggccgtgggccgcgtctctctgggcctgcgaatggcaatgccgcgggacttctgcgcgattattcacgcccccgcggtatccggccccgggccccacgtgatgctcggtctcgtcgactcgggctaccgcggaaccgtcctggccgtggtcgtagccccgaacgggacgcgcgggtttgcccccggggccctccgggtcgacgtgacgtttctggacatccgggccacccccccgaccctcaccgagccgagctccctgcaccggtttccgcagttggcgccgtccccgctggcagggttacgagaagatccttggttggacggggcgctcgcgaccgccgggggggcggtggccctgccggccagacggcgcgggggatcgctggtctacgcgggcgagctaacgcaggtgaccaccgagcacggcgactgcgtgcacgaggcgcccgcctttctgccaaagcgcgaggaggacgcaggctttgacattctcatccaccgagccgtgaccgtcccggccaacggcgccacggtcatacagccgtccctccgcgtattgcgcgcggccgacggaccagaggcctgctatgtgctggggcggtcgtcgctcaatgccaggggcctcctggtcatgcctacgcgctggccctccgggcacgcctgtgcgtttgttgtatgtaacctgaccggagtcccggtgaccctacaagccgggtccaaggtcgcccagctgctcgtcgcggggacccacgccctcccctggatcccccccgacaacatccacgaggacggcgcattccgggcctaccccagaggggttccggacgcgaccgccaccccccgagacccgccgattttggtgtttacgaacgagtttgacgcggacgcccccccaagcaagcggggggccggggggtttggctccactggcatctagaccgcgcctcgcgtcgggccagatggggccccggtcaataaagagctctgtttcgcatatgccctggtgttggcggtttttttttgttgtctgtctgcccggcgctcggttgtccgttctgtcgtcgctatcacatacgcacaaacacacgggtagagtggaaccgaaaccggtcgacgtttattcaccacacagaaacacaagctaagcgagaaggaggggggcctcggtcgacgaggcctggcgtttgggggcggacgtgcgatgacgtgggtccggtgtagggtccgcggggggcacgggcccggggcgaacgggggatctgtcgccggcgtgggtgactgggaccgacgcaacctccggggcttgtgccctcgtaggcccggggggggcctcggtcgctccaagccccgcggtgcgggtccctccggccagagccgaggtggagagaccaagggcccgctccgcgatcgccacgtcctccatgaccacgtcgctctcggccatgctccgaatggcctgggagacgagcacgtccgccgacttgtccgcggcccccaccgacatgtacatctgcaggatggtggccatgcacgtgtccgccaggcggcgcatcttgtcccgatgcgccgcaacggccccgtcgatggtggagccctcgagtcccgggtggtggcgcgccagcctctcgaggttgaccatgcaggcgtggtatgtgcgggccagggcgcgcgccttcacgaggcgccgggtgtcgtccagcgactctagggcgtcgtcgagcgtgatgggggcgggcaaaagcgcattgaccaccgccagggcctcctgcagccgcggctccgcctccgagggcggagccgcggcccgaatcatctcatattgttgttcctcggggcgcgttccccaaccgcacagcaccccgagcagggacgccatcccggaacacgcgcgcggctctgcgccggctttcccccaccccaccccctccgggttcgcaggggcgatggggacggaagactgcgatcacgaagggcggtcggttgcggctcccgtggaggttacggcgctgtatgcgaccgacgggtgcgttatcacctcctcgctcgccctcctcacaaactgcctgctgggggccgagccgttgtatatattcagctacgacgcgtaccggtccgatgcgcccaatggccccacgggcgcgcccaccgaacaggagaggttcgaggggagccgggcgctctaccgggatgcgggggggctaaatggcgattcatttcgggtgaccttttgtttattggggacggaagtgggcgtgacccaccacccgaaagggcgcacccggcccatgtttgtgtgccgcttcgagcgagcggacgacgtcgccgtgctccaagacgccctgggccgcgggaccccattgctcccggcccacgtcacagcaactctggacttggaggcgacgtttgcgctccacgctaacatcatcatggctctcaccgtggccatcgtccacaacgcccccgcccgcatcggcagcggcagcaccgcccccctgtatgagcccggcgaatcgatgcgctcggtcgtcgggcgcatgtccctggggcagcgcggcctcaccacgctgttcgtgcaccacgaggcgcgcgtgctgggggcgtaccgccgggcgtattatgggagcgcccaaagccccttttggtttctgagcaaattcggcccggacgaaaagagcctggtgctggccgctaggtactacctactccaggctccgcgcttggggggcgccggagccacgtacgatctgcaggccgtgaaagacatctgcgcgacctacgcaatcccccacgacccacgccccgacaccctcagtgccgcgtccttgacctcgttcgccgccatcactcggttctgttgcacgagccagtactcccgcggggccgcggccgctgggtttccgctgtatgtggagcgccgcatcgccgccgacgtacgcgagaccggcgcgctggagaagttcatcgcccacgatcgcagctgcctgcgcgtgtccgaccgggaattcattacgtacatctacctggcccactttgagtgcttcagccccccgcgcctggccacgcatctccgggccgtgaccacccacgaccccagccccgcggccagcacggagcagccctcgcccctgggtcgggaggcggtggaacagttcttccggcacgtgcgcgcccagctgaacatccgcgagtacgtaaagcaaaacgtcacccccagggaaaccgccctggcgggagacgcggccgccgcctacctgcgcgcgcgcacgtatgccccggcggccctcacgcccgcccccgcgtactgcggggtcgcagactcgtccaccaaaatgatgggacgtctggcggaagcagaaaggctcctagtcccccacggctggcccgcgttcgcaccaacaacccccggggacgacgcggggggcggcactgccgccccccagacctgcggaatcgtcaagcgcctcctcaagctggccgccacggagcagcagggcacgacgcccccggcgatcgcggctctcatgcaggacgcgtcggtccaaacccccctgcccgtgtacaggattaccatgtccccgaccggccaggcgtttgccgcggcggcgcgggacgactgggcccgcgtgacgcgggacgcgcgcccgccggaagcgaccgtggtcgcggacgcggcggcggcgcccgagcccggcgcgctcggccggcggctcacgcgccgcatttgcgcccggggccccgcgctccccccgggcggcctggccgtcgggggccagatgtacgtgaaccgcaacgagatcttcaacgccgcgctggccgttacgaacatcatcctggatctggacatcgccctgaaggagcccgtcccctttccccggctccacgaggccctgggtcactttaggcgcggggcgctggcggcggttcagctgttgtttcccgcggcccgcgtagaccccgacgcctatccctgttattttttcaaaagcgcctgtcggccccgcgcgccgcccgtctgtgcgggcgacgggccctcggccggtggcgacgacggcgacggggactggttccccgacgccggtggtcccggcgacgaggagtgggaggaggacacggaccccatggacacgacccacggccccctcccggacgacgaggccgcgtacctcgacctgctacacgaacagataccagcggcgacgcccagcgaaccggactccgtcgtgtgttcctgcgccgacaagatcgggctgcgcgtgtgcctaccggtccccgccccgtacgttgtgcacggctccctgacgatgcgtggggtggcgagggtgatccagcaggcggtgctgttggaccgcgacttcgtggaggccgtagggagccacgtaaagaactttttgctgatcgatacgggcgtgtacgcccacggccacagcctgcgcttgccgtatttcgccaagatcggccccgacggctccgcgtgcggccggttattgcccgtcttcgtgatcccccccgcgtgcgaggacgttccggcgttcgtcgccgcgcacgccgacccgcggcgcttccactttcacgccccgcccatgttttccgcggccccgcgggagatccgcgtcctccacagcctgggcggggactatgtcagctttttcgagaagaaggcgtcgcgcaacgccctggagcactttgggcgacgcgagaccctgacggaggttctgggccgctacgatgtgcggcccgacgccggggagaccgtggaggggttcgcgtcagaactgctggggcgaatagtcgcgtgcatcgaggctcactttcccgagcacgcgcgggaatatcaggccgtgtccgttcgccgggccgtcattaaggacgactgggtcctgctgcagctgatccccggccgcggcgccctgaaccaaagcctctcgtgtctgcgcttcaagcacggcagggcaagtcgcgcgacggcccggacctttctcgcgctgagcgtcgggaccaacaaccgcctatgcgcgtccctgtgtcagcagtgctttgccactaaatgcgataacaaccgcctgcacacgctgtttaccgtcgatgcgggcacgccatgctcgcggtccgctccctccagcacctcacgaccgtcatcttcataacggcctacggcctcgtgctcgcgtggtacatcgtctttggtgccagtccgctccaccgatgtatttacgcggtgcgccccgccggggcgcacaacgataccgccctcgtgtggatgaagataaaccagacgctgttgtttctgggcccgccgaccgccccccccggcggggcatggaccccccacgcccgcgtctgctacgccaatatcatcgaaggtcgggccgtgtccctcccggccatccccggcgccatgagccgccgggtcatgaacgtgcacgaggccgtaaactgcttggaggccctctgggacacccagatgcgcctggtggtcgtcggttggtttctgtatctagcgttcgtcgcccttcaccaacgacgatgcatgttcggcgtcgtgagtcccgcgcacagcatggtggccccggcgacctatcttttgaactacgccggccgcatagtgtcgagcgtgttcttgcaatacccctacacgaaaatcacccgcctcctctgcgagctatccgttcaacgccagaccctggtgcagctgttcgaggcggatccggtcaccttcttgtaccaccgcccggccattggcgtcatcgtgggctgcgagctgctgctccgcttcgtggccctcggtctcatcgtcggcaccgctctcatctcccggggcgcctgcgcgatcacacaccccctgtttctaacaatcaccacctggtgtttcgtgtccatcatcgccctgacggagctgtatttcatcctgcggcggggctcggcccccaaaaacgcggaaccagcggcccccagggggcgctccaaagggtggtcgggcgtctgcgggcgctgctgttccatcatcctctccggtatcgccgtgcgcctgtgctatatcgccgtcgtggccggggtggtgctcgtggcgcttcgctacgaacaggagattcagcggcgcctgtttgatctgtgacgtaacgcctcttccgttggaagaggcggacccagtcgcccatacaaattaaatacacgacccgcctcgggcctacgcaccctcgcacgtcgcatgcaaattaaaatcgtgcacagagccgatccggcctcgggtctgcttgcccctcccccggcccagcacaggcaggctcgtccgacttccgcatacaccccaccctaccgcgtgcttccgcacccccgcctacgcgtgtacgcgaaggcggacccagacctgccgtatgctaattaaatacataaaacccaccctcggtgtccgattggtttctggggacggcgggggcgggggcggtgacgcccgacggggagggacaaggaggagtttcggaaagccggccccggtcgtgcgggtataagggcagccaccggcccactgggcgctgtgtgctgccgtgtgccgaccccggttgcgcgtcggtgccgctcctcgattcggacccggccactctcttccgacacgcgccccctcggaggacacccgccatcccagccccggcgacctacaacatggctaccgacattgatatgctaatcgacctaggattggacctgtccgacagcgagctcgaggaggacgctctggagcgggacgaggagggccgccgcgacgaccccgagtccgacagcagcggggagtgttcctcgtcggacgaggacatggaagacccctgcggagacggaggggcggaggccatcgacgcggcgattcccaaaggtcccccggcccgccccgaggacgccggcacccccgaagcctcgacgcctcgcccggcagcgcggcggggagccgacgatccgccacccgcgaccaccggcgtgtggtcgcgcctcgggaccaggcggtcggcttccccccgggaaccgcacggggggaaggtggcccgcatccaacccccgtcgaccaaggcaccgcatccccgaggcgggcggcgaggtcgccgccggggccggggtcgatacggccccggcggcgccgactccacaccaaaaccccgccggcgcgtctccagaaacgcccacaaccaagggggtcgccaccccgcgtcggcgcggacggacggccccggcgccacccacggcgaggcgcggcgcggaggggagcagctcgacgtctccgggggcccgcggccacgaggcacgcgccaggccccccctccgctgatggcgctgtccctgacccccccgcacgcggacggccgcgccccggtcccggagcgaaaggcgccctctgccgacaccatcgaccccgccgttcgggcggttctgcgatccatatccgagcgcgcggcggtcgagcgcatcagcgaaagctttggacgcagtgccctggtcatgcaagacccctttggcgggatgccgtttcccgccgcgaacagcccctgggctcccgtgctggccacccaagcgggggggtttgacgccgagacccgtcgggtttcctgggaaaccctggtcgctcacggcccgagcctctaccgcacattcgcagccaacccgcgggccgcgtcgacagccaaggccatgcgcgactgcgtgctgcgccaggaaaatctcatcgaggccctggcgtccgcggatgagacgctggcgtggtgcaagatgtgcattcaccacaatctgccgctccgcccccaggaccctatcatcggaacggcggccgccgtgctggaaaacctcgccacgcgcctgcgcccctttctgcagtgctacctgaaggcccgaggcctgtgcgggctggacgacctgtgctcgcggcgacgcctgtcggacattaaggatattgcctcctttgtgttggtcatcctggcccgcctcgccaaccgcgtcgagcgcggcgtgtcggagatcgactacacgaccgtgggggttggggccggcgagacgatgcacttttacatcccgggggcctgcatggcgggtctcattgaaatactggacacgcaccgccaggagtgttccagtcgcgtgtgcgagctgacggccagtcacactatcgcccccttatatgtgcacggcaaatacttctactgcaactccctattttaggcaagaataaacatattgacgtcaacccaagtggttccgtgtgatgttcttggcgcgcgcggcgggtggggcggagactccggggcgatgccggcgtgcgcgtgggaggagggcgatgacccaccggataaatgtggggccccggcccggcccgcttcatagcgcgtccaggaactcacggcagacgcgtattcaccgacccccccctcgcaacatgacaacgacgcccctctcgaacctgtttttacgggccccggacatcacccacgtcgcccccccgtactgtctgaatgccacgtggcaggccgaaaacgccctgcacacgaccaaaacggaccccgcgtgcctggccgcgcggagttatttagtccgcgcctcctgctcgaccagcggccccatccactgttttttctttgcggtgtacaaggactcgcagcactcccttccgctggttaccgagctccgcaacttcgcggacctggtcaaccacccgcccgtcttgcgcgaactagaggataagcgtggggggcggctgcggtgcacgggcccattcagctgcggaaccatcaaggacgtctccggtgcatcccccgcgggggaatacacgataaacggtatcgtgtaccactgtcactgtcggtatccgttctccaaaacctgctggctcggggcatccgcggccctacaacaccttcgctctataagctcaagcggcacggccgctcgcgcggcagaacagcgacgccacaaaatcaaaatcaaaatcaaggtataacccacccccttccctccgagtccgtatgcaacctcattaataaagagtgagaaccaaccaaaacagacgcggtgtgagtttgtgggttataggaacccggtaaataccacgcgacgaaccagcatgtgtgttaacgcaacttttattcgttgtatcgcgggaggggggaagcttaccgccaaaggaaggccaagatgataacgacgaccaccgcgaccaccccaaaaaccgcatgacgacacgtcccgccacaccaccctggggcttggggcgtgtcggagctcgacgcacagcgggccgcgcgttgggcccggtacagctctcgcgaattgacaagcgggggtcgccacgtgcgcgagctttgcacgcggggttggtcggccggccccacggacccgcccggtggctcggtcggacatgcggccatgaccatggcgtaggtgggggggcgatccgaggtcgcctctgcgtaagtagggaggcccgacgggaggtcgcctcccacgccagggtgggccccaatcatagtttccggtagaaacaggggggtctccacaaacaacccccctgggccaaagctccggcgccgcgcccgtcgttcggcgcggcgcctggcgcgccgagcggcccgccaggcggcgcggcgcgagcggccacgctcacacacctcgccgtcaccggaagaagccggtgaaacaagcccaaccggcgacgtccctgcagagtacggtggaggcgagtccgtgggggtgtcgatatcaataacgacaaactggcccgcgctcgcgccggccacactctcgtatgggggcggggcgtcaatcacgctatcatctccgtcatccctgcatgcgtgggcatgcccagcccccaacgccatggtggggattcgcggctcagaagcctgcatgtcgtgtggtcggtcgtagtccaacgtgcctcccccacccaccacacagccggtccccacgccgaccactagaccgcagacgtcgcccaaccgaggtccccgtgcacagaccgcgccttttatagccccaggggttgctaattaacgcacgcatgcagacgcaatttattttgctcccccgcgtcctcccctcccctgcgcacacgtgataggtcttgggaacccgaggggcgacgcggggaaagcgcgcccccgcccggccgccgcgcgcccccgcccggccgccgcgcgcccccgcccggccgccgcgcgcccccgcccggccgccgcgcgcccccgcccggccgccgcgcgcccccgcccggccgccgcgcgcccccgcccggccgcccgcgtcgcgccggcgccccctcccggcgcttccggggtctttccttccttccccgccgcgaccccgaccccgccccaccgccccgcccggcaggggggccccggcgccgcgcagaacacacagacgaacacacggtggcgatcttttctttacttcggcggaccagcgagccccggccccggcccgcgccccgccgccacacccacggcacccccccccgccgcccaccccggggtccacacaggagcgcgcgggcggcagaaacgcgggcgcggcggcggtcggggtgggagtggtggtgggggacacgaaaacacacccacgacactctccccccaccccgaccgccgccgcgccccaccggcgggatcgcggcgagacgcagccgggcccccccccaccacccgcccacccacctaccccgcgcccgcagcctccggcagcacgccgaccaccgccgccaccccccaaacagccaaggcgcggtggggggcgtggtggtgaacgatggggggaacacgggggggaggggtccggggcgaggcgggcgggcgaaggaagggggggtggtggcggcggcggtggaaagcggaaaaacggaggatggaagggcagaagatggggagtcccgatcctcctcctgcatcccctcgccttccattctccggccctccgcgagtcccgacgccccccccccgccgcccgacgaaggagacccaagcaccgcagccggagaggccgagcggggagtgggcggccgggcgggaggatggcggagagagagagagagagagagagagggggggggggggagagggaaagcaacgggaaagagaggcgcgcggaaaagcagcaagaggggggacggggcgagccgggcagagtgcggagcccccggagcccgcggccgcagccgagcagcgccgcgggctccggggccgggccgggccggcaacgccccgcgccggccgcggcggagagaacccctgtgtcattgtttacgtggccgcgggccagcagacgggccgcgggccagcagacgggccgcggcgccagcggcccacgcctcccgccgcattaggcccccgcgggcatccggcggccggccccacgcccttccattaaacactcccacgttgggggggggcgcgccagctgagtgctctgcggttgcgggcgccgtgcccggagatccattaagccgccggagagcccgagccccgcccgcgtgttgctgtgggcatttctgctgcgtcatccctgtctttataaaaccgggggcgcggcagcaacgaacgcaggggcccgccgccgatcgagagggactccggagaaggaaggctgctccgcgcaccggcgcgcccttctcctctcccctccctacctccccctctcttcccccttttttcccccgcctcccgtcttcttccgcgcctccgagggtccgcctcttgcctcggggacccccgggcgggccggggcttggccgccgaggtgcgccccggccggaggggcccccgcacctcggcggccgccccctccggcgccgcgcgttcgcgaaaggcgcgaaaggggcccccggaggcttttttcgattcccggccgggggtcccgggtagccgcccggcgccgggcggaaggcgtcccccgcccggcggtccggcccgggcccccggcggagcgcgggggccccggggccccgggccgcgccggcggcgtttccgcgttccgtttcttctccctcccgggccgccccgctcccgggcccgaccctcgccccttcccttctcctcgtcttcccccgtcccgccgcgccccttccctcttccttctctctctctgtctcgctctcctcacatttcccccccccccccccgccgccgccgccctttgcccgcgtcccaccgagacgccgcgccgcgtgagccgtccgccgggggacccaggctccggggggggggggcgcctgcgtgtgtctcgtgtgagagagcgcgcccctcgaacgccgcgcgttctcgcaggtaggtttagggtcgtacaggtgagcttctgctgaggcggcggggagagggggggggggcgggcggaagagagaagagagcaggggttgggggagaactgttcttcctccccctttcaagaaacacgaggcgggggtcccagaaagggcaggcaggtcagccgcaccgcccgcgagccaacccgtatcctttttttctaggtgtttttgtttttgtttctgtttttgtttgttttgttattattttcgcggatccggcgtgttcggatccaccccccctttctccttcctcttcccttccacccacccccgtttcccccccccccgtcgtcgttcccgggggggcaggcgcgggtcgggcccgtacgcccaccgcccccacgcgccggtcacccccccccaacaaccccaaaggcgcgtgcccggccacagccgtgggtgtggcgcccgtccccttcctctaccgcgtgggcgcgggcgggggggtggtggtagtggtggcggaaggaaacgggccgggggccggggccgctagggaaaggtaggcacgcgcgcggtgtgtcgacttgcatgccccgcaaaacgcgtcgtgtcgtgttgtgtcgtggtgggccgtgttgtggtgggccgtgtggtgtggtgtggtgttgcgaacgcgcgagccccctcgccccgatgggagtctccccgcagccagggtaaggaggggcgggcgtggcgggcaggtgtgcgggcggggtggggtgagtgcggttgcatgcctcgggtctcctcttcctgctcctcctcctttctcccagccagggtgaggaggggcgggcgtggcgggcaggtgtgcgggcggggtgggcgccggggcgggggtgggcacgggcgtaagtgcgggtgcatgcctcgggtcttctcttctccctcctccttcctcccacccgtccccgggggcagagggcgtgcatgcgttgtgattcaaccgccctcgcccccgccccactttcccccctctctatcaaagttccctggcccctggcttcgcgccggtggtgcggctgaccccccccctcctccctccccgagccaggcgccctcccactcctgcccaccacccccagggtctggccggccagacgtgcgtgctctgcacgatcgggcccccctccctgtcaacacggacacactctttttttacccgccagccagcccgcccacccaccaagacagggagccagaacgaggccgggccccggctctgttctatgataaagaccaacaggcctcgggggtgggggcggcttctcgtgcccgccccccctcctcctcctcccttcccccccatccccggcccccctgcgcgggggagctgcatcaaaggccaacaacaaagtgtgtcaaaagcatcacaaaactttattgtaaaatttttataaatataaagttttttttttcctcaagttttcaacaaggccagaaagtccataacaaaatgctggtgtgtgttgctgttcggggccgtgtccgtcccccccccccactcccacccccacttcctgtctcctccccgtctttccccccccccacctccccctgcccccgaggcgcctcggccggtggtccggtggggggcggcttccttcgggcagcaagccgagtgttagctccccctactccccgtggcccgcgggggcgtcgccggccggcgcgggcgcgccctgctcccgagaccacgggtggcgcgaccggaggccgtggaagtccagcgcgcccaccagggtgccctggtcaaagagcatgttgcccaccggggtcatccagaggctgttccactccgacgcggggggcgtcgggtagtcggggggcctcacgcagttgcgcgcgtgctcggggagcagggtgcggcggctccacgcgggggccgcggcccgcagcaggtccgccacgttccccgtctggtccacgaggaccacgtaggcccctatgtggcccgtctccatgtccaggacgggcaggcagtcccccgtgaccgtcttgttcacgtaaggcgccagggccacgacgctcgagacccccgcgatgggcaggtagcgcgtgaggccgggcgccgggtcgcgggccccgggctcggggccgccctccgcgtggcgcgtcttcctggcacacttcctcggcccccgcggcgcagcagcgcgggggccgagggaggtttctcgtctctccccagcgccggacgcggacgcgacgctcccaccagccccgcccgcagaggaagaggcggaggaggaggaggcggaggaggaggaggcggaggaggaggaggcggaggaggaggaggcggaggaggaggaggcggaggaggaggaggcggaggaggaggaggcggcggcgaccgcggcctgggacgacggagacgccgacgggggcgcggcgcccgcggacgccggggcgagcggcccgtggccgcggtcgcccgagtccgagtccggggcccggcgcggcgccgccctcttggcccccaccccctggggggcgaggggcgagcgcggggcggcggaggaagaggcggaggacgaggccgcggggcccgagtccgacccgcgcctcttccgggggcgggccgccgccccctccgcggcgtggggggcggcaccgggggtgttggtgccgcgggggaccccgggtcctccctccgcgcccggccctcccgacccgcgcgcgtcggtcgcgcctgcccggcccagactctgtgcttgggtgtcggtctgagcctgggtcatgcgcgaccggggcgcgcggtgcgcgtccaccggcacggcgggcggcgcgggcccggccgcgtccgcgctcgcagacaccacgggggcggcggcggcgcggggcggactccggacgcgcggggcgacggccgcgcgggggcgcgcggcgcgccccgacgactgtggcagacctccccccccggggcccgaggacacctgtgcggaggaggaggagacaaaggagagcggcccggggcccgcggggcggcgcggagacggcgggggagagtcgctgatgactatggggggctcctgggccgcgcggggctgtctcgcggggggcgtcctgccctccgccgccgcggcgtcttcgcccacccgccgcgcctgcgcgcgccccccgccggccgcagggggaagagaggccactctcggcacgacggccgcgacggcagggccgcccccagacccagatcccacccccgcccgcaacggggcgccgccgctgctgctgctccgcggggcgccagggggcgccggtcgggtcgcggcgggctgggaggttccgcgggtcgcccccgcaccgccgcccccgcgccggggcgctcttcggggggcgggcgggacgtagtccactgcagagggagacagagacgggagcccccggttagtgcccgacccccgcccgacccccgcccgacccccgcccgacccccgcccgacccccgcccgacccccgcccgacccccgcccgacccccgcccgacccccgcccgacccccgcccgccccccgcccgacccccgcccgccctcaccgtcggccaggtcatcgtcctcgtcgtccgtgccgggccacgggggggtgggcgacagggcgcggaccgtgtgtccccccagcgacagggagcgcggggccgtccgcgggttgcccgtccagataaagtccacggccgtgccggcccgcacggccgcctcggcctccacgcgggtccgggggtcgttcactatcgggatggtgctgaacgacccgctggcggtcacgcccactatcaggtacgccaccggggtgttgcacaggggacacgtgttgcgcaacggaatccaggtcttcatgcacgggatgcagaaggggtgcaggcagggaaaactctggcagcgcaggggcggggcgatctcgtccgtgcacacggcacacacgtcgcccccccctcccgcttccgcttcctcctcacccacgggcccacccccacaggatccctgcgcgtcggcgggcgtggggctgccctggcgctcggccgggggccgggccgggggcgtggccgcgtccatcaggcccgcctcgaacatctccgtgtccgtgctgcccgcctcggaggtggagtcgcggtgaaggtcgtcgtcagagattcccacctcggtctcctcctccgagtcgctgctggcgagccactgcatgtcgttgagcatcccccaggcgtgcggggcggcgggctgcttgacaaagcaacgggggggatttagagggcgcggggcgtgaggcgggacccccgcgccgtgtcccccgtgtccctccctcaccccggccccccgcccgctgctttttgttcggaagggggggagaaaggggtccgtaaccaaaggtggtctgcgtcctttggattccgacccctcgtctccccccctgtcccccgctctcgggctcctccctgcctccctcgcccccccagagggtcggggggcggcgcacggcccacgggggtcccccgaccgcttaagcgggccgggggtcggccccgtcaagcgtccccgcccccgagcccaccgcccgcgaccacccccaacccgcagccgggtggtccggggaaaagggggggcctgagacccgggggtcgccctctcaccgtgccgggggtctgccgcggcggccgctcggggccggggtccgcccgggagctcgtgccgggccggggttccatgagccggggtagggtagactcgagacggcggcccgcggtctctctcttgccgggttttagtctctgtctctccgggtctcctcctcccgccgggccgccgctccgtcgctcgcagtgccggggtgcgaatgcggcccgaccgtcacacggggctgccttatacccggcgcctatccactcccccaaaggggcggcatttacgattcccccaatagccgcgcgccccggcgggggcggagggagggaatccccccctctcggggcggccccgtccccggggaccaaccgggtgtactccaagaaccccattagcatgcgccgccccccgccgacgcagatgggagtccccccggcgccccgccggcgcggccctgagtggtgcccgcccccggggaaaaattcattagcatactaggaagcccaggggaccaataggggccgatcagcccacccacccggcggcgcgcgaggctctgcgtgttctgccaagaaagtaatcagcataacccggaaccccgagggagtaattacgcggggagcgaggggccgtccgaacgtttttaattaccataagcgggaatggcggcccgttaaaagctgctaattaccgcgagcgggaacgccggcccattaaaagttgctaattaccatgcgcggggatggcggccgggaccgcctattaaaagtttctaattaccataccgggaagccggcgcggggcggtcgccggggcggagtccgggcccgcgcggcggcgcgcggttggccggcgccgccccctggggcgggcggagcggcggggcggcgccgggccctcgcggatatatacgcggggctcccatcgtctcttcggagagcggcctcgcgcagaccttcggagctccggggctccgccggccgaggccgccctcgccggttcaaccctagaccgcccgacggcccgggcccgcggcggcggaggacccgcgcgccgccgccgccgcctcctcctcctccgcgggtccgccgtcttcgtgggcccgggctcgggctcgggcccgagctcgggcctcgggctccaggcacggtccgatgaccgcctcggccgccgccacgcggcgccggaaccggtcgcggtcggcccgctcgcgcgcccaggacccccgtcgggccaggcgcgcggccgtctcccaggccaccagatggcgcacctgcacgcgcggcgagaagcacacctgcgggcggggagacacgggggtcggaggggcgtcagggggtcggaggggcgtcagggggtcggaggggcgtcagggggtcggaggggcgtcagggggtcggaggggcgtcagggggtcggaggggcgtcagggggtcggaggggaggcgtaccttcccgcgcggcgcgtccgcgggcggggacgcggggggccgccgccggcgcaggctcaggcgcgccaggtactccgtcgtggtgcgcagccgtagcgccaggtggggcggaagggggcgctgcggcccgcgctccttgcgcggcggcggcggggggcaggcggcggcaggcgcggcgtgcggggcctccggcgccttccccccgccctcgctcggggggctgttcgcccactctgcgtcgtcgttgccggcgtagtccgcgtcgtcgctgtcgtccgcctggggcaccagcagccagcgccgcaggagcgaggacgcggccggcgcgctctcgaccgcggttcccgagtcgtacgcagggaccatttgggagtctgcggttgggagcgcgccggggcgcggcacggctggagcgccggggcgcggcacggctggagcgccggggcgcggccggcgccggggaccccggcggcggggaccccggcggcgggacatggcgggcggctgggctcggcgtaggcccggagccggagcgcgtcggggcgggagagttcactcggcacgcatgcacgtgtaaccgccagtccgtgcttgcctagcgaactcacccgtcccggctggcgtgcgcagcccgggccgtgttgcgggccctcttaaggggcggcggcaggacggggactcccgccccgcctcttttcccccggggagtcaacccccggggggggtgttttttgggggggggcgcgaaggcgggcggcggcggcgggcgggcggcagggcagccccgcgcgcccccttccccgtccctcccccggagccggccgctcccccgcgggcgccgcccctccccccgcgcgccgcggggctgccttcccgcgggcgcccccgcgcggcttttttcccgcgcccgcccccgcgcggcaggacggggactagcaggctgtgccgcagaccaccacacactcccaagctccccgcccccccgaagacgccagtcgcaccaccgctcgccctcgcagaccagacagttgcaccaagcacccgcccgcccgcacacggttccccgccaccccctccctcccctccatcccgccgagctcgcggcagcccctcccccccgcgcgccacggggctgcggtcccgcggccgcctcccccgcggccgcctcccccgcgccccgccccgggggcttcccccgcccctccccccgcgcccgcggccccgagctcgcagcagcccctccctcccgcgccccgtgccttccctcccgctcctgcgggggggctcgggccacctgaccttcgtaacctgcactcaggtcagagccccagaccccccgcgggcgcgggagacgtgccgcccgcccgacccccgcccgcccgacccccgcccgcccgacccccgcccgcccgacccccgcccgcccgacccccgcccgcccgacccccgcccgcccgacccccgcccgcccgacccccgcccgcccgacccccgcccgcccgacccccgcccgcccgacccccgcccgcccgacccccgcccgcccgacccccgcccgcccgacccccgcccgcccgacccccgcccgcccgacccccgaataaaccacacaaggcggtacgttttcgtctgtctcgttctttatttctcacacacgcgcgcggccatcgccgcgtctgtcttaaaggcgcacagacgcccgattccttccccctctccccatctcccccctcccccgctcccggaagtttccccccccgtcactccccaaacagtccgtcgtcgtcgtcctccagctccgcgtccatgtccacgggctcgcgcctcggcggcgtggccagccccgcggcggtccccaccacctccacgccgccgcccgccgcggccagcaccgtccccgcgcggcccgcggccgacgcccagcgtatctgcgggggcgggcccgcgtccgcgtcgtcgcgcagcaccagcgggggcgcgtcgccgtcgggctcgagcagcgcccgcgcgcagaactcccgccgcggcccgcgcagctccgccgggccgccgcgcacggcgtcgcgccccagcgccacgtagacgggccgcagcggcgcgcccaggccccagcgcgcgcaggcgcggtgcgagtgcgcctcgtcctcgcagaagtccggcgcgccgggcgccatggcgtcgcccgcgcccgaggcggcggcccggccgtccagcgccgggagcacggcgcggcggtactcgcgcggggacatgggcaccagcgtgtcggggccgaagcgcgtgcgcacgcggtaccgcacgttggccccgcggcagaggcgcagcggcggcgcgtcggggtacaggcgcgcgtgcgcggcctccacgcgcgcgaagacccccggcccgaacacgcggccggaggccagcacggtgcggcgcaggtcccgcgccgccggccagcgcacggcgcactgcacggcgggcagcacctcgcaggccaggtaggcgtgctgccgcgagaccacgggcccgtcggcgggccagtccgcggcgcgcacggcgttgacgacgatgaggcggcggtcgcaggcgccggccagcagccccaggaactccacggcgccggcgaaggccaggtcccgcgtggacagcagcagcacgccctgcgcgcccagcgccgagacgtcgggggcgccggtccagttgcccgcccaggcggccgtggcgggcccgcagagccggttgcccagggccgccagcaggcaggacagcccgccgcgctcggcggaccactccggggggggcccgcccccggcgcggcccgcggccaggtcctcgcccggcagcggcgagtagaggatcaccacgcgcacgtcctccgggtcgggcacctggcgcatccaggccgccgcgcggcgcagcgggcccgaggcgcgcagcgggccgaaggcggcgggcgcgccgccggggggcggggcggcgcagcgcgcggccagcgaggccagcgcgcgcgggtcgaacatgagggccgggcgccacggcgcggggaagagcgggtggtccgtgagctcggccacggcccgcggggcgcagtaggcctccagggcggcggccgagggcgccggcgtgtggctgggccccggcggctggcggcgccagccgccctgcgggtcggggccctcggcgggccggcgggtcagcgccgcggggcgcggcggccgcggcggcggcgtcggcggggcggggggcgcggcccccgcgggaggggcggccgcggggcggggggcgtccgcgcggctcttcttcggggggcgcggggcgccgcccggcggcgccctggccggggcggggctcttgcgcttgcgcgcctcccgcggcgcggaggcgggcgcggcgagcgagtcggccgcggcgacggtgtcggccagcagggggcgcaggctctggttctggaagagcaggtccgcggcggcggcggcggcggagctcagcaggcgcgggctccgcggcagcgccgggcccagggccccggcgaccaggctcacggcgcgcacggcggccacggcggcctcgctgccgccggccacgcgcaggtccccgcgcaggcgcatcagcaccagcgcgtcgcgcacgaaccgcagctcgcgcagccaggcgcgcaggcggggcgcgtcggcgtgcggcggggcggccgcgcccgcgggccccgggcgcgggggcgcggcgggccgggctccggccagccccggcacggccgccaggtcgccgtcgaagccctccgccagcgcctccaggatcccgcggcaggcggccaggcactccacggccacgcggcccgcctccgcgcgccggccgccgccaccaccgccggcgccgtcgtcgtcgtcgtcgtcgtcggccccggccggcgcggaggcgggcgcggcgctcaggcgccccagggcggcgagcacccccgcggcgccgtagccggcgggcaccgcgcgctcgtcggccggcgacgccgccgccgacggcaacggggcggcggcggcggcgggcttcccgcgggcgtcgtcgccgtcgtggcggttggcgtcgccgccgtcgtcgggggttcgcgccccggtcagcgccgcgttctcgcgcgccagcaggggcgcgtaggcgcggcgcaggctggtcagcaggaagcccttctgcgcgcggtcgtagcggcggctcatggccacggcggccgccacgtgcgccaggccccagccgaagcggcccgccgccatggcgtaccccaggtggggcacggcccgcgccacgctgccggagatgaaggagctgctgttgcgcgccgcgcccgagatccggaagcaggcctggtccagcgccacgtccccgggcgccacgcgcgggttctggagccaccccatcgcctccgcgtccggcgtgtacagcagccgcgtgatcagggcgtactgctgcgccgcgtcgcccagctcgggcgcccacacgggcgccggggcgcccgaggcctcgaaccgggcccgcgcctcctccgcctcgggcgccccccagaggccggggcggctgtcgcccagcccgccgtacagcacgcgccccgggggcggggggccggccccgggccacggctccccgctgacgtacccgtcgcggtagcgcgcgtagaaggcgccggaggccgcgtcggcgtccagctcgacccgccggggccgcccggccgtgaagcggcccgtggcgtcgcggccggccaccgccgcgcgggcccggcggcgctccaggcggcccgcggtcgccgcgggggtccgggccggggcgggctcggccctgggcgggctcggccggggcgccgcccccggggccctcgcgggcacccccgcctcctcgtcgtccgcgccgagggtcccgcccgcggcgtggtctgcggcgctggcgggggcgcgggcggcgtcgtcgtcgtcgtcgtcgtcagacgaggaggcggatgcagacgaggaggaggaggcggaggaggaggcggaggacgccgacgacgaggatccggattttgatgagtcagaggcggccgagcgccggcggggggcgcgccggcggcggtggtggtggtggtggtggtgtcggcggggcgccgggggtcgcggcgacaggctggccatggggtccgggtacgccccgcggaccgcggacgtcgtctccggtccgcggacccagcggcccgcgtcgcggtcgtcgtcatcgtcgtcgtcgtcgtcgtcgtcgttctcctcgccataatcggcgcgcatggagggggtccgcggcggagaaggcgagcgggccgcttcttcttgcgcgccgtcgcgctccggggggggcgacgggatcgtgcgaacggcctcgtccaccatcgaggccagcagggccagctgccgcggcgagacgacgccgtccgcggcaggctcgtcgacggcctccccggacgccggggccgcctcgtcggcatcggcatcggcggcggcgtcgtcggcctcgtcttcgttctcctccggcccaccgtgccacccgaacccgggccgcgcggcggggcgacggtccgggttcggggtgggcggcggtccgtcggctggatccggagatccggggccgccggtcgtctccgccgcggcccggagacgtcccccgtcctcgtccgccatcgcgacctcggccccgcggccctgcgtcgtcgtcgtcgtcttcttcttcttccgctgctccgccgacatcgcctccgaccggggtgtgcggggggggggtcttcttcttcttcttcaggggcggcagtgggggggggtggttggcagtctctctcccccccgtgcggtgcgtgcgtgtgcctgtgtcttttcgcctctccgcgccgatcgggtagatcctggcggccgcgtcggtagccgcgctccgtgtggacgatcgccccgtcgcctggctgatatagtcctcggggcgcgcggggcggggggaaaggaggaggacgcggaggaggagcgatcgacgccgccgcgccccggctcgccggggttccgcccccaggtggaaccgcattatgcgcggccccgccccgacgcccgcgcgtccgcgtccgtggcggcggcccgttggtcgcgccgccgccgctccgcccgcgcggcatctcattagcgcccggcgcgggcggcttccgcttccgcccgcgatgctaatgagaccctcgtcgcgggcgggctcgctcccctgcccttccgggttcgtggtaatgagatgccggccccgcgctcccgttggcccccgccggccccaaaggggccggcgaggtcgccccgttggtccgcgggcggctccgccccaaagggggcggggccgcagggtaaaagaagtgagaacgcgaagcgttcgcacttcgtcctaatagtatatatattattagggcaaagtgcgagcgctggcgccctgcccggggcccgcgtcatcccgcgctccgccccaaagggggcggggccgcagggtaaaagaagtgagaacgcgaagcgttcgcacttcgtcctaatagtatatatattattagggcaaagtgcgagcactggcgccctgcccggggcccgcgtcatcccgcgggctccgccccgaggcgggcccggacggggggcgggccgttcctcgcgcacataaagggccggcgtcccggtcgccgccgcaccaggggcacaccggctgcgcggcggagaccgggacggcagcggcggcatcgcgaagggggccacagcgagacagagacgccggcggcgagcggggcaccgacgcacccggatcggatcggatacagagacgcgggcgcatcggttccttttcgttctgcctttccctcccccccccccccccccaccctgtacgtaccgcgaggacccatccacccactgcagccttatcgcaggtacggtgacccggggggccggccggggggacgggcgggggacggggggacgggccggggggacgggccggggggacgggccggggggacgggccggggggacgggccggggggacgggccggggggacgggccggggggacgggccggggggacgggccggggggccggggggccggggggccggggggccggggggacggggggacggggggacggggggacggggggacggggggacggggggacggggggacggggggacggggggacggggggacggggggacggggggacggggggacggggggacggggggacggggggacgggccggggggacggggggacgggccggggggacggggggacgggccggggggacggggggacgggccggggggacggggggacgggccggggggacggggccccgatcccaacatccgcgctttctcgcaggccgggcgccgccttcgtggacgggacaccggtgtggtaactggcgacaaggcgttgccactatggcagacatccccccggacccgcccgcgctcaacacgacgcctgcgaatcatgctcccccatccccacccccgggttcacggaagcgcagacgccccgtcctccccagctcgtcggaatctgagggtaagcccgacacagaatcggaatcctcctcgaccgagtcgtccgaggatgaggcgggagacctacgcggcgggcgccgtcgctccccgcgggagctcggggggaggtattttttggatctgtcggcagaatcgaccacggggacggaatcggagggaacggggccgtcggacgacgatgatgatgatgcgtcagacggctggttggttgacacacccccccgcaaatccaagcgaccccgaatcaacctgcgattaacgagctcccccgaccggcgtgcgggtgtggttttccccgaggtgtggagaagcgacagacctatccgcgcggcgcaaccccaggccccggccagtcttccggggatcgcgcacgcgcaccggcgctctgctcgccaggcccagatgcggagcggagccgcctggacgcttgatctgcattacatacgccagtgcgtcaaccagctctttcggatcctgcgtgccgccccgaacccgcccggcagcgccaaccgcctgcgccacctggtgcgagactgctacctcatgggctactgccggacccgcctggggccgcgcacgtggggccgcctgctgcagatctcgggcggaacctgggacgtgcgcctgcgaaacgcaatccgggaggtcgaggcgcattttgaacccgccgccgagcccgtgtgcgagctgccctgtctgaacgccaggcgttacggccccgagtgtgatgttggcaatctcgagaccaacggcggctcgacgagcgatgatgagatatcggatgcgacggactcggacgataccctcgcgtcccattccgacacggagggggggccctccccggccggccgggagaacccggaatccgcgtccggcggggctatcgcggctcggctggagtgtgagtttgggacgtttgactggacgtccgaggagggctcccagccctggctgtccgcggtggtcgccgataccagctccgccgaacgctctggcctacccgccccgggcgcgtgtcgcgcaacggaagccccagaacgcgaggacgggtgccgaaaaatgcgcttccccgccgcctgcccctatccctgcggccacacatttctccggccatgagcgcgggacccccagcccggtgtgtttgccaaacgaaaaataaacgccctacaagaaagcttttgtgtctgagtgtctggtttttctgggggtggaggaaggaacgacaaaaaaaagaaacaaacgcgacaccgctcgtacgtgtaatggggccgcagtgttttttattagcatcggggggggttagaggttggtgattggatagcaaacgtgggatgacggaggccactcgtcgccaacggccagcgggggcccggggttctgggggtcatcgtcccccgtctgccaggagggctcatcgggaatctcgggtcgccccatgcacgtaaaacacgggcgctgcgtggggtgggtcgccggatgcgggcgggatgatgcggggcggggtttgttgtgaggagccacgagggaccgtagccagcgaagacagctgcgttcccggtcgccgggcaccaccacgccgtattggtattcgtatcggctaaggagattttccagggggtgattaggcgctgcggggaacggggtccacgacacggtccgctcgggcaaaaaccgatcgggcaggggccacggttcccccacccacgcgtcgttggtcttcgtggcgatgaagcgaaaccccagccgggttttttgtgcgtactcgaaaaacggcacacacaggtccgccgccccgaccacccacaggtggtatagccggtgggggccggggcgctcttgatgcaggagccgaaaacacgcaggggcatccagaatctcgatgctttccagggggtcgtcctccgcaaacaggcccgtcgtggtgtttgggggacagcgacaggagcgggttcgcacgatcggtcgggtgaatttgggcaagtccatcagaggctcggccagcctgcgaaggttcgccgggcgaaccaccaccggggttcccagaggctcggaggccaggatccggcattgccgaagcagaaaactccacagagccgggcttgcgtcagcggaagtccgcggcagggcgtttcgttggtctaggagggtaaccacacttacaacaacaacgcccatgtcggtatattaggcccgtggtccgatcttcactcactcgcctgtctgcggacctatgcacggcgggacggcgcgcggacccgggggggctgcttgctatcacacggcccgttcgcacgttcgattttttcagccttgtttggttggctaggtatcccggataatctgacgttccggatatagggggcggggggtagtggggggtgtgtcgacaaactgccgcttcttaaaacaccggggcccgtcgctcggggtgctcgttggttggcacgcgcgacgcggcaaatggcctgtcgtaagttctgtggggtctaccgtagacccgacaagagacaggaggcgtccgtcccgccggagacaaacacggccccggccttcccggcgagcaccttttatacccccgcggaggatgcgtacctggcccccgggcccccggaaaccatccacccttcccgcccaccgtcccccggcgaggctgcgcgcctgtgtcagctgcaggagatcttggcccagatgcacagcgacgaggactaccccatcgtggacgccgcgggtgcggaggaggaagacgaggccgacgatgacgccccggatgacgtggcctacccggaggactacgcggaggggcgttttctgtccatggtttcggccgcccccctgcccggagccagcggccatcctcctgttccgggccgcgcagccccccccgacgtccggacctgcgacacgggtaaggtgggggccacggggttcaccccggaagagctcgacaccatggaccgggaggcacttcgggccatcagccgcgggtgcaagcccccttcgaccctggcaaaactggtgaccgggctgggattcgcgatccacggagcgctcatcccggggtcggaggggtgtgtctttgatagcagccacccgaactaccctcatcgggtaatcgtcaaggcggggtggtacgccagcacgagccacgaggcgcggctgctgagacgcctgaaccaccccgcgatcctacccctcctggacctgcacgtcgtttctggggtcacgtgtctggtcctccccaagtatcactgcgacctgtatacctatctgagcaagcgcccgtctccgttgggccacctacagataaccgcggtctcccggcagctcttgagcgccatcgactacgtccactgcaaaggcatcatccaccgcgatattaagaccgagaacatcttcatcaacacccccgagaacatctgtctgggggactttggggcggcgtgctttgtgcgcgggtgtcgatcgagccccttccattacgggatcgcaggcaccatcgatacaaacgcccccgaggtcctggccggggatccgtacacccaggtaatcgacatctggagcgccggcctggtgatctttgagaccgccgtccacaccgcgtccttgttctcggccccgcgcgaccccgaaaggcggccgtgcgacaaccagatcgcgcgcatcatccgacaggcccaggtacacgtcgacgagtttccgacgcacgcggaatcgcgcctcaccgcgcactaccgctcgcgggcggccgggaacaatcgtccggcgtggacccgaccggcgtggacccgctactacaagatccacacagacgtcgaatatctcatatgcaaagcccttacctttgacgcggcgctccgcccaagcgccgcggagttgctgcgcctgccgctatttcaccctaagtgaccccgctccccccggggggcgtggaggggggggctggttggatgtttttgcacaaaaagacgcggccctcgggctttggtgtttttggcaccttgccgcccggcgtcatgcacgccatcgctcccaggttgcttcttctttttgttctttctggtcttccggggacacgcggcgggtcgggtgtccccggaccaattaatccccccaacagcgatgttgttttcccgggaggttcccccgtggctcaatattgttatgcctatccccggttggacgatcccgggcccttgggttccgcggacgccgggcggcaagacctgccccggcgcgtcgtccgtcacgagcccctgggccgctcgttcctcacgggggggctggttttgctggcgccgccggtacgcggatttggcgcacccaacgcaacgtatgcggcccgtgtgacgtactaccggctcacccgcgcctgccgtcagcccatcctccttcggcagtatggagggtgtcgcggcggcgagccgccgtccccaaagacgtgcgggtcgtacacgtacacgtaccagggcggcgggcctccgacccggtacgctctcgtaaatgcttccctgctggtgccgatctgggaccgcgccgcggagacattcgagtaccagatcgaactcggcggcgagctgcacgtgggtctgttgtgggtagaggtgggcggggagggccccggccccaccgcccccccacaggcggcgcgtgcggagggcggcccgtgcgtccccccggtccccgcgggccgcccgtggcgctcggtgcccccggtatggtattccgcccccaaccccgggtttcgtggcctgcgtttccgggagcgctgtctgcccccacagacgcccgccgcccccagcgacctaccacgcgtcgcttttgctccccagagcctgctggtggggattacgggccgcacgtttattcggatggcacgacccacggaagacgtcggggtcctgccgccccattgggcccccggggccctagatgacggtccgtacgcccccttcccaccccgcccgcggtttcgacgcgccctgcggacagaccccgagggggtcgaccccgacgttcgggccccccgaaccgggcggcgcctcatggccttgaccgaggacacgtcctccgattcgcctacgtccgctccggagaagacgcccctccctgtgtcggccaccgccatggcaccctcagtcgacccaagcgcggaaccgaccgcccccgcaaccactactccccccgacgagatggccacacaagccgcaacggtcgccgttacgccggaggaaacggcagtcgcctccccgcccgcgactgcatccgtggagtcgtcgccactccccgccgcggcggcggcaacgcccggggccgggcacacgaacaccagcagcgcctccgcagcgaaaacgccccccaccacaccagcccccacgacccccccgcccacgtctacccacgcgaccccccgccccacgactccggggccccaaacaacccctcccggacccgcaaccccgggtccggtgggcgcctccgccgcgcccacggccgattcccccctcaccgcctcgccccccgctaccgcgccggggccctcggccgccaacgtttcggtcgccgcgaccaccgccacgcccggaacccggggcaccgcccgtacccccccaacggacccaaagacgcacccacacggacccgcggacgctccccccggctcgccagcccccccaccccccgaacatcgcggcggacccgaggagtttgagggcgccggggacggcgaaccccccgaggacgacgacagcgccaccggcctcgccttccgaactccgaaccccaacaaaccaccccccgcgcgccccgggcccatccgccccacgctcccgccaggaattcttgggccgctcgcccccaacacgcctcgcccccccgcccaagctcccgctaaggacatgccctcgggccccacaccccaacacatccccctgttctggttcctaacggcctcccctgctctagatatcctctttatcatcagcaccaccatccacacggcggcgttcgtttgtctggtcgccttggcagcacaactttggcgcggccgggcggggcgcaggcgatacgcgcacccgagcgtgcgttacgtatgtctgccacccgagcgggattagggggtgggggtggggggcgagaaacgatgaaggacgggaaagggaacagcgaccaaatgtcacgataagaacaataaacctgtgacgtcaatcagatatgtgagtttggttgtgttttgtgggactgggggcggggggtgggaggtatcagtgggtgacagagtcttttaaaagacgtgtcccggggccctcgagatgcgcaacttttggccacacagagaaaggcccccagacgaagtcacccgggtccccgaacaaaaacaaaaaccttgaccgccgccggggggcgtgcctgttgttttggtctcaatggatcggtatgccgttcggacctgggggattgtgggaatcctcgggtgtgctgctgttggggccgcacccaccggccccgcgtccgatacaacaaacgcgaccgcacgcctccccacgcaccccccactcatccgttccgggggctttgccgtccccctcatcgtgggggggctgtgtctcatgattctggggatggcgtgtctactcgaggtcctgcgtcgcctgggtcgcgagttggcgaggtgctgcccccacgcgggccaatttgccccatgatttttcgcctttctggccttgcccccaccccatcgccccgattgtgtgtcgggtgcccggggtacagcagctatggagcggtcggtaatataactttggttgtcgccacacgccccgtgccgggcatgggttgtgcgggaaggacgaaataatccggcgatccccaagcgtaccaactgggggggggggggggggggaaaagaaactaaaaacacatcaagcccacaacccatcccacaatgggggttatggcggacccaccgcaccaccatactccgattcgaccacatatgcaaccaaatcacccccagaggggaggttccatttttacgaggaggaggagtataatagagtctttgtgtttaaaacccggggtcggtgtggtgttcggtcataagctgcattgcgaacgactagtcgccgtttttcgtgtgcatcgcgtatcacggcatggggcgtttgacctccggcgtcgggacggcggccctgctagttgtcgcggtgggactccgcgtcgtctgcgccaaatacgccttagcagacccctcgcttaagatggccgatcccaatcgatttcgcgggaagaaccttccggttttggaccagctgaccgacccccccggggtgaagcgtgtttaccacattcagccgagcctggaggacccgttccagccccccagcatcccgatcactgtgtactacgcagtgctggaacgtgcctgccgcagcgtgctcctacatgccccatcggaggccccccagatcgtgcgcggggcttcggacgaggcccgaaagcacacgtacaacctgaccatcgcctggtatcgcatgggagacaattgcgctatccccatcacggttatggaatacaccgagtgcccctacaacaagtcgttgggggtctgccccatccgaacgcagccccgctggagctactatgacagctttagcgccgtcagcgaggataacctgggattcctgatgcacgcccccgccttcgagaccgcgggtacgtacctgcggctagtgaagataaacgactggacggagatcacacaatttatcctggagcaccgggcccgcgcctcctgcaagtacgctctccccctgcgcatccccccggcagcgtgcctcacctcgaaggcctaccaacagggcgtgacggtcgacagcatcgggatgctaccccgctttatccccgaaaaccagcgcaccgtcgccctatacagcttaaaaatcgccgggtggcacggccccaagcccccgtacaccagcaccctgctgccgccggagctgtccgacaccaccaacgccacgcaacccgaactcgttccggaagaccccgaggactcggccctcttagaggatcccgccgggacggtgtcttcgcagatccccccaaactggcacatcccgtcgatccaggacgtcgcgccgcaccacgcccccgccgcccccagcaacccgggcctgatcatcggcgcgctggccggcagtaccctggcggtgctggtcatcggcggtattgcgttttgggtacgccgccgcgctcagatggcccccaagcgcctacgtctcccccacatccgggatgacgacgcgcccccctcgcaccagccattgttttactagaggagtttccccgctcccgtgtacctctgggcccgtgtgggagggtggctggggtatttgggtgggacttggactccgcataaagggagtctcgaaggagggaaactaggacagttcataggccgggagcgtggggcgcgcaccgctgtcccgacgattagccaccgcgcccacagccacctcgacccgtccgatcccggtatgcccggccgctcgctgcagggcctggcgatcctgggcctgtgggtctgcgccaccggcctggtcgtccgcggccccacggtcagtctggtctcagactcactcgtggatgccggggccgtggggccccagggcttcgtggaagaggacctgcgtgttttcggggagcttcattttgtgggggcccaggtcccccatacaaactactacgacggcatcatcgagctgtttcactaccccctggggaaccactgcccccgcgttgtacacgtggtcacactgaccgcatgcccccgccgccccgccgtggcgttcaccttgtgtcgctcgacgcaccacgcccacagccccgcctatccgaccctggagctgggtctggcgcggcagccgcttctgcgggttcgaacggcaacgcgcgactatgccggtctgtatgtcctgcgcgtatgggtcggcagcgcgacgaacgccagccggtttgttttgggggtggcgctctctgccaacgggacgtttgtgtataacggctcggactacggctcctgcgatccggcgcagcttcccttttcggccccgcgcctgggaccctcgagcgtatacacccccggagcctcccgacccacccctccacggacaacgacacccccgtcctccccccgagacccgacccccgcccccggggacacagggacgcccgcgcccgcgagcggcgagatagccccgcccaattccacgcgatcggccagcgaatcgagacacaggctaaccgtagcccaggtaatccagatcgccataccggcgtccatcatcgcctttgtgtttctgggcagctgtatctgcttcatccatagatgccagcgccgatacaggcgcccccgcggccagatttacaaccccgggggcgtttcctgcgcggtcaacgaggcggccatggcccgcctcggagccgagctgcgatcccacccaaacaccccccccaaaccccgacgccgttcgtcgtcgtccacgaccatgccttccctaacgtcgatagctgaggaatcggagccaggtccagtcgtgctgctgtccgtcagtcctcggccccgcagtggcccgacggccccccaagaggtctaggtccaagcgggccgttcggcaggcccgccccaccgcccccatcgtggttatttccccccccccccccccaataaaccgatgttatttgcctatatgcgtgtgttggatccctttgtgatcgttcgtcattccccggatggcatgggaggcgggtaatggatgggcggggcccggggggaggaaaaagaataaagggggtagtgtcggagaggcccgccgcgcatttaaggagtcgccgccccgactctgtgtcttcgggtgacttggtgcgccgccgtcagctagtctccgatctgccccgaccgacggctcctgccacccgaacatggctcgcggggccgggttggtgttttttgttggagtttgggtcgtatcgtgcctggcggcagcacccagaacgtcctggaaacgggtaacctcgggcgaggacgtggtgttgcttccggcgcccgcggaacgcacccgggcccacaaactactgtgggccgcggaacccctggatgcctgcggtcccctgcgcccgtcgtgggtggcgctgtggcccccccgacgggtgctcgagacggtcgtggatgcggcgtgcatgcgcgccccggaaccgctcgccatagcatacagtcccccgttccccgcgggcgacgagggactgtattcggagttggcgtggcgcgatcgcgtagccgtggtcaacgagagtctggtcatctacggggccctggagacggacagcggtctgtacaccctgtccgtggtcggcctaagcgacgaggcgcgccaagtggcgtcggtggttctggtcgtggagcccgcccctgtgccgaccccgacccccgacgactacgacgaagaagacgacgcgggcgtgacgaacgcacgccggtcagcgttccccccccaaccccccccccgtcgtccccccgtcgcccccccgacgcaccctcgtgttatccccgaggtgtcccacgtgcgcggggtaacggtccatatggagaccctggaggccattctgtttgcccccggggagacgtttgggacgaacgtctccatccacgccattgcccacgacgacggtccgtacgccatggacgtcgtctggatgcggtttgacgtgccgtcctcgtgcgccgatatgcggatctacgaagcttgtctgtatcacccgcagcttccagagtgtctatctccggccgacgcgccgtgcgccgtaagttcctgggcgtaccgcctggcggtccgcagctacgccggctgttccaggactacgcccccgccgcgatgttttgccgaggctcgcatggaaccggtcccggggttggcgtggctggcctccaccgtcaatctggaattccagcacgcctccccccagcacgccggcctctacctgtgcgtggtgtacgtggacgatcatatccacgcctggggccacatgaccatcagcaccgcggcgcagtaccggaacgcggtggtggaacagcacctcccccagcgccagcccgagcccgtcgagcccacccgcccgcacgtgagagccccccatcccgcgccctccgcgcgcggcccgctgcgcctcggggcggtgctgggggcggccctgttgctggccgccctcgggctgtccgcgtgggcgtgcatgacctgctggcgcaggcgctcctggcgggcggttaaaagccgggcctcggcgacgggccccacttacattcgcgtggcggacagcgagctgtacgcggactggagttcggacagcgagggggagcgcgacgggtccctgtggcaggaccctccggagagacccgactctccctccacaaatggatccggctttgagatcttatcaccaacggctccgtctgtatacccccatagcgaggggcgtaaatctcgccgcccgctcaccacctttggttcgggaagcccgggccgtcgtcactcccaggcctcctatccgtccgtcctctggtaaggcgtcttccgacgacgcggacgtcggcgatgaactgattgccatcgcggacgcacgcggggacccgccagagaccctgccccccggcgcgggcggcgccgcgcccgcgtgccgcagaccacctcgcggcggctcccccgcggcctttcccgtggccctccacgccgtggacgccccctcccaattcgtcacctggctcgccgtgcgctggctgcggggggcggtgggtctcggggccgtcctgtgcgggattgcgttttacgtgacgtcaatcgcccgaggcgcataaaggtccggcggccaccccgccgcagctcataaaaatcgtgagtcacggcaaccccaccttcgcctccgccctccgccagcgcccttccgcgtccgcgatgacctcccggcccgccgaccaagactcggtgcgttccagcgcgtcggtgccgctttaccccgcggcctcgcccgtcccggcagaagcctactactcggaaagcgaagacgaggccgccaacgacttcctcgtgcgcatgggccgccagcagtcggtcctaaggcgccgacggcggcgcacgcggtgcgtcgggctggttatcgcctgtctcgtcgtggccctcctatctggagggttcggggcacttttggtgtggctgctccgctaaatgacgcctcgatgtatggcgccttcttcgcccccacccctcgccgcgacccacgtccgtatgttaattgcaataaagtggttgattgtcattacggtctactaggttgtcttttttttttgggggggggggaggaaatgcagaaaagggtaagaaattctcggaatttcacccccgggggggggcaagtgcagtaacccagttcctcagtgtttgggaaatctattgaactctcccggctcctccgtgttagggaagtctcttggggaaatctattgacctctcgcccccccccccccaggaggggggcagtgcagtaccccagttcctccgtgctggggaaatctctctgccgggtacgggctccagacgaaggacccatacatttccccatccgcaccccacatctggcgttctagagtcacgacgcatttgcccccgtccccgcagcaacacacaaagcgatttcaattttcacgattttattattaattacaccaaccaccctgtccccgggacgtggtcaggaccgggggtccgcacccaaacgcacgaaacaaatgctggcagtgtgccgaatataaccccgcgtaggaacacgtcgacgcgtgcgccaaacagcaccagaaggcgcatgccatcagcaggtcgtgcatatggcgatgtgtttggacgcagggcgcagccgcggcgataaaattcatggcggccgtccgccagggccacagcggcgaggactccctgttggcccgaagccattgggtatgaaccagctgcgcctcctgtccgaccctggctcccgccagcgggggcggtgggtcgtgggtgttgagagcacacaggcgggacacctcgatcaccgtccgaaaaaaggcccggtggtccgcgggcagcatctgcaggtgcgccagggcctgggcgttgagagggtacaactcggagccgggggactccgggggccggtccgcgcggtgccgcgagttggcacgctttggggcccgggtgtcggacgcgggcgcgttatggatcccgacgcggggcagaacgtacgtgcgttggcgcggcgatgaggggtccgggctgccgaggggggcgtaggggaccgggctaggcaagcccgcgggttgcgcggggttcccgtgggggtctaggctccctgggcacccgtgggggtcgtgggggtcgcgggtccctgggtatgcgcgggaccctgggttctctgggagatcgtggaactcgcggttccctgggctctcggggaacccggggctccctggggacacgtggtgccctgggaattcttgatggtcggacggcttcagatggcttcgggatcgagagggccgcacagactcgtagtagacccgaatctccacgtttccccgccgccggatcatggtcgccgccccggtgcgggggcccgtcggtcggaagcgagtgcccttcaagcgtgtccgctcctctgggctgcatgccgtcggatggggtgccttttaaggaaaggtctcggctgcccgccccaaccggggtttgggggtgggccggggaaaccccggatgccatgggggggtcacaccctaagcgccggcgcgctggttgggtgggggtagaggggagtccccggtcgacgagatcgtatcaaggggccagcacgcgatcctgccgctcgttcgatctagcacacccacgggtctgctgtgtgggatttcgactcgcgggatccgatcgcacgtccggaggacacagcagcgggagctccgggtcggtcaccgcagttctggccgcctctcggtcctcccgttcccttttatggatctccgcgcagacatcgccatacgtccggtgtgtgcaccgcgaagaatccagaaacatgtccgtcgttttcagggcccaagacatggtgtcccgtccacgaaggcggcgcccggcctgcgagaaagcgcggatgttgggatcggggccccgtccccccggcccgtccccccgtccccccggcccgtccccccgtccccccggcccgtccccccgtccccccggcccgtccccccgtccccccggcccgtccccccgtccccccgtccccccgtccccccgtccccccgtccccccgtccccccgtccccccgtccccccgtccccccgtccccccgtccccccgtccccccgtccccccgtccccccgtccccccgtccccccggccccccggccccccggccccccggccccccggcccgtccccccggcccgtccccccggcccgtccccccggcccgtccccccggcccgtccccccggcccgtccccccggcccgtccccccggcccgtccccccggcccgtccccccgtcccccgcccgtccccccggccggccccccgggtcaccgtacctgcgataaggctgcagtgggtggatgggtcctcgcggtacgtacagggtgggggggggggggggggagggaaaggcagaacgaaaaggaaccgatgcgcccgcgtctctgtatccgatccgatccgggtgcgtcggtgccccgctcgccgccggcgtctctgtctcgctgtggcccccttcgcgatgccgccgctgccgtcccggtctccgccgcgcagccggtgtgcccctggtgcggcggcgaccgggacgccggccctttatgtgcgcgaggaacggcccgccccccgtccgggcccgcctcggggcggagcccgcgggatgacgcgggccccgggcagggcgccagtgctcgcactttgccctaataatatatatactattaggacgaagtgcgaacgcttcgcgttctcacttcttttaccctgcggccccgccccctttggggcggagcgcgggatgacgcgggccccgggcagggcgccagcgctcgcactttgccctaataatatatatactattaggacgaagtgcgaacgcttcgcgttctcacttcttttaccctgcggccccgccccctttggggcggagccgcccgcggaccaacggggcgacctcgccggcccctttggggccggcgggggccaacgggagcgcggggccggcatctcattaccacgaacccggaagggcaggggagcgagcccgcccgcgacgagggtctcattagcatcgcgggcggaagcggaagccgcccgcgccgggcgctaatgagatgccgcgcgggcggagcggcggcggcgcgaccaacgggccgccgccacggacgcggacgcgcgggcgtcggggcggggccgcgcataatgcggttccacctgggggcggaaccccggcgagccggggcgcggcggcgtcgatcgctcctcctccgcgtcctcctcctttccccccgccccgcgcgccccgaggactatatcagccaggcgacggggcgatcgtccacacggagcgcggctaccgacgcggccgccaggatctacccgatcggcgcggagaggcgaaaagacacaggcacacgcacgcaccgcacgggggggagagagactgccaaccacccccccccactgccgcccctgaagaagaagaagaagaccccccccccgcacaccccggtcggaggcgatgtcggcggagcagcggaagaagaagaagacgacgacgacgacgcagggccgcggggccgaggtcgcgatggcggacgaggacgggggacgtctccgggccgcggcggagacgaccggcggccccggatctccggatccagccgacggaccgccgcccaccccgaacccggaccgtcgccccgccgcgcggcccgggttcgggtggcacggtgggccggaggagaacgaagacgaggccgacgacgccgccgccgatgccgatgccgacgaggcggccccggcgtccggggaggccgtcgacgagcctgccgcggacggcgtcgtctcgccgcggcagctggccctgctggcctcgatggtggacgaggccgttcgcacgatcccgtcgccccccccggagcgcgacggcgcgcaagaagaagcggcccgctcgccttctccgccgcggaccccctccatgcgcgccgattatggcgaggagaacgacgacgacgacgacgacgacgatgacgacgaccgcgacgcgggccgctgggtccgcggaccggagacgacgtccgcggtccgcggggcgtacccggaccccatggccagcctgtcgccgcgacccccggcgccccgccgacaccaccaccaccaccaccaccgccgccggcgcgccccccgccggcgctcggccgcctctgactcatcaaaatccggatcctcgtcgtcggcgtcctccgcctcctcctccgcctcctcctcctcgtctgcatccgcctcctcgtctgacgacgacgacgacgacgacgccgcccgcgcccccgccagcgccgcagaccacgccgcgggcgggaccctcggcgcggacgacgaggaggcgggggtgcccgcgagggccccgggggcggcgccccggccgagcccgcccagggccgagcccgccccggcccggacccccgcggcgaccgcgggccgcctggagcgccgccgggcccgcgcggcggtggccggccgcgacgccacgggccgcttcacggccgggcggccccggcgggtcgagctggacgccgacgcggcctccggcgccttctacgcgcgctaccgcgacgggtacgtcagcggggagccgtggcccggggccggccccccgcccccggggcgcgtgctgtacggcgggctgggcgacagccgccccggcctctggggggcgcccgaggcggaggaggcgcgggcccggttcgaggcctcgggcgccccggcgcccgtgtgggcgcccgagctgggcgacgcggcgcagcagtacgccctgatcacgcggctgctgtacacgccggacgcggaggcgatggggtggctccagaacccgcgcgtggcgcccggggacgtggcgctggaccaggcctgcttccggatctcgggcgcggcgcgcaacagcagctccttcatctccggcagcgtggcgcgggccgtgccccacctggggtacgccatggcggcgggccgcttcggctggggcctggcgcacgtggcggccgccgtggccatgagccgccgctacgaccgcgcgcagaagggcttcctgctgaccagcctgcgccgcgcctacgcgcccctgctggcgcgcgagaacgcggcgctgaccggggcgcgaacccccgacgacggcggcgacgccaaccgccacgacggcgacgacgcccgcgggaagcccgccgccgccgccgccccgttgccgtcggcggcggcgtcgccggccgacgagcgcgcggtgcccgccggctacggcgccgcgggggtgctcgccgccctggggcgcctgagcgccgcgcccgcctccgcgccggccggggccgacgacgacgacgacgacgacggcgccggcggtggtggcggcggccggcgcgcggaggcgggccgcgtggccgtggagtgcctggccgcctgccgcgggatcctggaggcgctggcggagggcttcgacggcgacctggcggccgtgccggggctggccggagcccggcccgccgcgcccccgcgcccggggcccgcgggcgcggccgccccgccgcacgccgacgcgccccgcctgcgcgcctggctgcgcgagctgcggttcgtgcgcgacgcgctggtgctgatgcgcctgcgcggggacctgcgcgtggccggcggcagcgaggccgccgtggccgccgtgcgcgccgtgagcctggtcgccggggccctgggcccggcgctgccgcggagcccgcgcctgctgagctccgccgccgccgccgccgcggacctgctcttccagaaccagagcctgcgccccctgctggccgacaccgtcgccgcggccgactcgctcgccgcgcccgcctccgcgccgcgggaggcgcgcaagcgcaagagccccgccccggccagggcgccgccgggcggcgccccgcgccccccgaagaagagccgcgcggacgccccccgccccgcggccgcccctcccgcgggggccgcgccccccgccccgccgacgccgccgccgcggccgccgcgccccgcggcgctgacccgccggcccgccgagggccccgacccgcagggcggctggcgccgccagccgccggggcccagccacacgccggcgccctcggccgccgccctggaggcctactgcgccccgcgggccgtggccgagctcacggaccacccgctcttccccgcgccgtggcgcccggccctcatgttcgacccgcgcgcgctggcctcgctggccgcgcgctgcgccgccccgccccccggcggcgcgcccgccgccttcggcccgctgcgcgcctcgggcccgctgcgccgcgcggcggcctggatgcgccaggtgcccgacccggaggacgtgcgcgtggtgatcctctactcgccgctgccgggcgaggacctggccgcgggccgcgccgggggcgggccccccccggagtggtccgccgagcgcggcgggctgtcctgcctgctggcggccctgggcaaccggctctgcgggcccgccacggccgcctgggcgggcaactggaccggcgcccccgacgtctcggcgctgggcgcgcagggcgtgctgctgctgtccacgcgggacctggccttcgccggcgccgtggagttcctggggctgctggccggcgcctgcgaccgccgcctcatcgtcgtcaacgccgtgcgcgccgcggactggcccgccgacgggcccgtggtctcgcggcagcacgcctacctggcctgcgaggtgctgcccgccgtgcagtgcgccgtgcgctggccggcggcgcgggacctgcgccgcaccgtgctggcctccggccgcgtgttcgggccgggggtcttcgcgcgcgtggaggccgcgcacgcgcgcctgtaccccgacgcgccgccgctgcgcctctgccgcggggccaacgtgcggtaccgcgtgcgcacgcgcttcggccccgacacgctggtgcccatgtccccgcgcgagtaccgccgcgccgtgctcccggcgctggacggccgggccgccgcctcgggcgcgggcgacgccatggcgcccggcgcgccggacttctgcgaggacgaggcgcactcgcaccgcgcctgcgcgcgctggggcctgggcgcgccgctgcggcccgtctacgtggcgctggggcgcgacgccgtgcgcggcggcccggcggagctgcgcgggccgcggcgggagttctgcgcgcgggcgctgctcgagcccgacggcgacgcgcccccgctggtgctgcgcgacgacgcggacgcgggcccgcccccgcagatacgctgggcgtcggccgcgggccgcgcggggacggtgctggccgcggcgggcggcggcgtggaggtggtggggaccgccgcggggctggccacgccgccgaggcgcgagcccgtggacatggacgcggagctggaggacgacgacgacggactgtttggggagtgacggggggggaaacttccgggagcgggggaggggggagatggggagagggggaaggaatcgggcgtctgtgcgcctttaagacagacgcggcgatggccgcgcgcgtgtgtgagaaataaagaacgagacagacgaaaacgtaccgccttgtgtggtttattcgggggtcgggcgggcgggggtcgggcgggcgggggtcgggcgggcgggggtcgggcgggcgggggtcgggcgggcgggggtcgggcgggcgggggtcgggcgggcgggggtcgggcgggcgggggtcgggcgggcgggggtcgggcgggcgggggtcgggcgggcgggggtcgggcgggcgggggtcgggcgggcgggggtcgggcgggcgggggtcgggcgggcgggggtcgggcgggcggcacgtctcccgcgcccgcggggggtctggggctctgacctgagtgcaggttacgaaggtcaggtggcccgagcccccccgcaggagcgggagggaaggcacggggcgcgggagggaggggctgctgcgagctcggggccgcgggcgcggggggaggggcgggggaagcccccggggcggggcgcgggggaggcggccgcgggggaggcggccgcgggaccgcagccccgtggcgcgcgggggggaggggctgccgcgagctcggcgggatggaggggagggagggggtggcggggaaccgtgtgcgggcgggcgggtgcttggtgcaactgtctggtctgcgagggcgagcggtggtgcgactggcgtcttcgggggggcggggagcttgggagtgtgtggtggtctgcggcacagcctgctagtccccgtcctgccgcgcgggggcgggcgcgggaaaaaagccgcgcgggggcgcccgcgggaaggcagccccgcggcgcgcggggggaggggcggcgcccgcgggggagcggccggctccgggggagggacggggaagggggcgcgcggggctgccctgccgcccgcccgccgccgccgcccgccttcgcgcccccccccaaaaaacaccccccccgggggttgactccccgggggaaaagaggcggggcggg
